United States Patent Application Publication US 2025/0333448 A1 - sequence listing, part 13

SEQ ID NO: 267519 - protein, 15 aa, Artificial Sequence
  Description of Artificial Sequence: Synthetic peptide
  Seed: SIGKVCRTLLAKSVF
SIIKVRRELLSKSVF

SEQ ID NO: 267520 - protein, 15 aa, Artificial Sequence
  Description of Artificial Sequence: Synthetic peptide
  Seed: SIGKVCRTLLAKSVF
SIIKVRRGLLAKSVF

SEQ ID NO: 267521 - protein, 15 aa, Artificial Sequence
  Description of Artificial Sequence: Synthetic peptide
  Seed: SIGKVCRTLLAKSVF
SIIKVRRGLLGKSVF

SEQ ID NO: 267522 - protein, 15 aa, Artificial Sequence
  Description of Artificial Sequence: Synthetic peptide
  Seed: SIGKVCRTLLAKSVF
SIIKVRRGLLQKSVF

SEQ ID NO: 267523 - protein, 15 aa, Artificial Sequence
  Description of Artificial Sequence: Synthetic peptide
  Seed: SIGKVCRTLLAKSVF
SIIKVRRGLLSKSVF

SEQ ID NO: 267524 - protein, 15 aa, Artificial Sequence
  Description of Artificial Sequence: Synthetic peptide
  Seed: SIGKVCRTLLAKSVF
SIIKVRRHLLAKSVF

SEQ ID NO: 267525 - protein, 15 aa, Artificial Sequence
  Description of Artificial Sequence: Synthetic peptide
  Seed: SIGKVCRTLLAKSVF
SIIKVRRHLLGKSVF

SEQ ID NO: 267526 - protein, 15 aa, Artificial Sequence
  Description of Artificial Sequence: Synthetic peptide
  Seed: SIGKVCRTLLAKSVF
SIIKVRRHLLQKSVF

SEQ ID NO: 267527 - protein, 15 aa, Artificial Sequence
  Description of Artificial Sequence: Synthetic peptide
  Seed: SIGKVCRTLLAKSVF
SIIKVRRHLLSKSVF

SEQ ID NO: 267528 - protein, 15 aa, Artificial Sequence
  Description of Artificial Sequence: Synthetic peptide
  Seed: SIGKVCRTLLAKSVF
SIIKVRRILLAKSVF

SEQ ID NO: 267529 - protein, 15 aa, Artificial Sequence
  Description of Artificial Sequence: Synthetic peptide
  Seed: SIGKVCRTLLAKSVF
SIIKVRRILLGKSVF

SEQ ID NO: 267530 - protein, 15 aa, Artificial Sequence
  Description of Artificial Sequence: Synthetic peptide
  Seed: SIGKVCRTLLAKSVF
SIIKVRRILLHKSVF

SEQ ID NO: 267531 - protein, 15 aa, Artificial Sequence
  Description of Artificial Sequence: Synthetic peptide
  Seed: SIGKVCRTLLAKSVF
SIIKVRRILLKKSVF

SEQ ID NO: 267532 - protein, 15 aa, Artificial Sequence
  Description of Artificial Sequence: Synthetic peptide
  Seed: SIGKVCRTLLAKSVF
SIIKVRRILLQKSVF

SEQ ID NO: 267533 - protein, 15 aa, Artificial Sequence
  Description of Artificial Sequence: Synthetic peptide
  Seed: SIGKVCRTLLAKSVF
SIIKVRRILLRKSVF

SEQ ID NO: 267534 - protein, 15 aa, Artificial Sequence
  Description of Artificial Sequence: Synthetic peptide
  Seed: SIGKVCRTLLAKSVF
SIIKVRRILLSKSVF

SEQ ID NO: 267535 - protein, 15 aa, Artificial Sequence
  Description of Artificial Sequence: Synthetic peptide
  Seed: SIGKVCRTLLAKSVF
SIIKVRRKLLAKSVF

SEQ ID NO: 267536 - protein, 15 aa, Artificial Sequence
  Description of Artificial Sequence: Synthetic peptide
  Seed: SIGKVCRTLLAKSVF
SIIKVRRKLLCKSVF

SEQ ID NO: 267537 - protein, 15 aa, Artificial Sequence
  Description of Artificial Sequence: Synthetic peptide
  Seed: SIGKVCRTLLAKSVF
SIIKVRRKLLDKSVF

SEQ ID NO: 267538 - protein, 15 aa, Artificial Sequence
  Description of Artificial Sequence: Synthetic peptide
  Seed: SIGKVCRTLLAKSVF
SIIKVRRKLLEKSVF

SEQ ID NO: 267539 - protein, 15 aa, Artificial Sequence
  Description of Artificial Sequence: Synthetic peptide
  Seed: SIGKVCRTLLAKSVF
SIIKVRRKLLGKSVF

SEQ ID NO: 267540 - protein, 15 aa, Artificial Sequence
  Description of Artificial Sequence: Synthetic peptide
  Seed: SIGKVCRTLLAKSVF
SIIKVRRKLLHKSVF

SEQ ID NO: 267541 - protein, 15 aa, Artificial Sequence
  Description of Artificial Sequence: Synthetic peptide
  Seed: SIGKVCRTLLAKSVF
SIIKVRRKLLIKSVF

SEQ ID NO: 267542 - protein, 15 aa, Artificial Sequence
  Description of Artificial Sequence: Synthetic peptide
  Seed: SIGKVCRTLLAKSVF
SIIKVRRKLLLKSVF

SEQ ID NO: 267543 - protein, 15 aa, Artificial Sequence
  Description of Artificial Sequence: Synthetic peptide
  Seed: SIGKVCRTLLAKSVF
SIIKVRRKLLMKSVF

SEQ ID NO: 267544 - protein, 15 aa, Artificial Sequence
  Description of Artificial Sequence: Synthetic peptide
  Seed: SIGKVCRTLLAKSVF
SIIKVRRKLLNKSVF

SEQ ID NO: 267545 - protein, 15 aa, Artificial Sequence
  Description of Artificial Sequence: Synthetic peptide
  Seed: SIGKVCRTLLAKSVF
SIIKVRRKLLPKSVF

SEQ ID NO: 267546 - protein, 15 aa, Artificial Sequence
  Description of Artificial Sequence: Synthetic peptide
  Seed: SIGKVCRTLLAKSVF
SIIKVRRKLLQKSVF

SEQ ID NO: 267547 - protein, 15 aa, Artificial Sequence
  Description of Artificial Sequence: Synthetic peptide
  Seed: SIGKVCRTLLAKSVF
SIIKVRRKLLRKSVF

SEQ ID NO: 267548 - protein, 15 aa, Artificial Sequence
  Description of Artificial Sequence: Synthetic peptide
  Seed: SIGKVCRTLLAKSVF
SIIKVRRKLLSKSVF

SEQ ID NO: 267549 - protein, 15 aa, Artificial Sequence
  Description of Artificial Sequence: Synthetic peptide
  Seed: SIGKVCRTLLAKSVF
SIIKVRRKLLTKSVF

SEQ ID NO: 267550 - protein, 15 aa, Artificial Sequence
  Description of Artificial Sequence: Synthetic peptide
  Seed: SIGKVCRTLLAKSVF
SIIKVRRKLLVKSVF

SEQ ID NO: 267551 - protein, 15 aa, Artificial Sequence
  Description of Artificial Sequence: Synthetic peptide
  Seed: SIGKVCRTLLAKSVF
SIIKVRRKLLYKSVF

SEQ ID NO: 267552 - protein, 15 aa, Artificial Sequence
  Description of Artificial Sequence: Synthetic peptide
  Seed: SIGKVCRTLLAKSVF
SIIKVRRLLLHKSVF

SEQ ID NO: 267553 - protein, 15 aa, Artificial Sequence
  Description of Artificial Sequence: Synthetic peptide
  Seed: SIGKVCRTLLAKSVF
SIIKVRRMLLHKSVF

SEQ ID NO: 267554 - protein, 15 aa, Artificial Sequence
  Description of Artificial Sequence: Synthetic peptide
  Seed: SIGKVCRTLLAKSVF
SIIKVRRNLLAKSVF

SEQ ID NO: 267555 - protein, 15 aa, Artificial Sequence
  Description of Artificial Sequence: Synthetic peptide
  Seed: SIGKVCRTLLAKSVF
SIIKVRRNLLCKSVF

SEQ ID NO: 267556 - protein, 15 aa, Artificial Sequence
  Description of Artificial Sequence: Synthetic peptide
  Seed: SIGKVCRTLLAKSVF
SIIKVRRNLLDKSVF

SEQ ID NO: 267557 - protein, 15 aa, Artificial Sequence
  Description of Artificial Sequence: Synthetic peptide
  Seed: SIGKVCRTLLAKSVF
SIIKVRRNLLEKSVF

SEQ ID NO: 267558 - protein, 15 aa, Artificial Sequence
  Description of Artificial Sequence: Synthetic peptide
  Seed: SIGKVCRTLLAKSVF
SIIKVRRNLLGKSVF

SEQ ID NO: 267559 - protein, 15 aa, Artificial Sequence
  Description of Artificial Sequence: Synthetic peptide
  Seed: SIGKVCRTLLAKSVF
SIIKVRRNLLHKSVF

SEQ ID NO: 267560 - protein, 15 aa, Artificial Sequence
  Description of Artificial Sequence: Synthetic peptide
  Seed: SIGKVCRTLLAKSVF
SIIKVRRNLLQKSVF

SEQ ID NO: 267561 - protein, 15 aa, Artificial Sequence
  Description of Artificial Sequence: Synthetic peptide
  Seed: SIGKVCRTLLAKSVF
SIIKVRRNLLSKSVF

SEQ ID NO: 267562 - protein, 15 aa, Artificial Sequence
  Description of Artificial Sequence: Synthetic peptide
  Seed: SIGKVCRTLLAKSVF
SIIKVRRNLLYKSVF

SEQ ID NO: 267563 - protein, 15 aa, Artificial Sequence
  Description of Artificial Sequence: Synthetic peptide
  Seed: SIGKVCRTLLAKSVF
SIIKVRRPLLAKSVF

SEQ ID NO: 267564 - protein, 15 aa, Artificial Sequence
  Description of Artificial Sequence: Synthetic peptide
  Seed: SIGKVCRTLLAKSVF
SIIKVRRPLLGKSVF

SEQ ID NO: 267565 - protein, 15 aa, Artificial Sequence
  Description of Artificial Sequence: Synthetic peptide
  Seed: SIGKVCRTLLAKSVF
SIIKVRRPLLHKSVF

SEQ ID NO: 267566 - protein, 15 aa, Artificial Sequence
  Description of Artificial Sequence: Synthetic peptide
  Seed: SIGKVCRTLLAKSVF
SIIKVRRPLLQKSVF

SEQ ID NO: 267567 - protein, 15 aa, Artificial Sequence
  Description of Artificial Sequence: Synthetic peptide
  Seed: SIGKVCRTLLAKSVF
SIIKVRRPLLSKSVF

SEQ ID NO: 267568 - protein, 15 aa, Artificial Sequence
  Description of Artificial Sequence: Synthetic peptide
  Seed: SIGKVCRTLLAKSVF
SIIKVRRQLLAKSVF

SEQ ID NO: 267569 - protein, 15 aa, Artificial Sequence
  Description of Artificial Sequence: Synthetic peptide
  Seed: SIGKVCRTLLAKSVF
SIIKVRRQLLGKSVF

SEQ ID NO: 267570 - protein, 15 aa, Artificial Sequence
  Description of Artificial Sequence: Synthetic peptide
  Seed: SIGKVCRTLLAKSVF
SIIKVRRQLLQKSVF

SEQ ID NO: 267571 - protein, 15 aa, Artificial Sequence
  Description of Artificial Sequence: Synthetic peptide
  Seed: SIGKVCRTLLAKSVF
SIIKVRRQLLSKSVF

SEQ ID NO: 267572 - protein, 15 aa, Artificial Sequence
  Description of Artificial Sequence: Synthetic peptide
  Seed: SIGKVCRTLLAKSVF
SIIKVRRRLLAKSVF

SEQ ID NO: 267573 - protein, 15 aa, Artificial Sequence
  Description of Artificial Sequence: Synthetic peptide
  Seed: SIGKVCRTLLAKSVF
SIIKVRRRLLCKSVF

SEQ ID NO: 267574 - protein, 15 aa, Artificial Sequence
  Description of Artificial Sequence: Synthetic peptide
  Seed: SIGKVCRTLLAKSVF
SIIKVRRRLLDKSVF

SEQ ID NO: 267575 - protein, 15 aa, Artificial Sequence
  Description of Artificial Sequence: Synthetic peptide
  Seed: SIGKVCRTLLAKSVF
SIIKVRRRLLEKSVF

SEQ ID NO: 267576 - protein, 15 aa, Artificial Sequence
  Description of Artificial Sequence: Synthetic peptide
  Seed: SIGKVCRTLLAKSVF
SIIKVRRRLLGKSVF

SEQ ID NO: 267577 - protein, 15 aa, Artificial Sequence
  Description of Artificial Sequence: Synthetic peptide
  Seed: SIGKVCRTLLAKSVF
SIIKVRRRLLHKSVF

SEQ ID NO: 267578 - protein, 15 aa, Artificial Sequence
  Description of Artificial Sequence: Synthetic peptide
  Seed: SIGKVCRTLLAKSVF
SIIKVRRRLLIKSVF

SEQ ID NO: 267579 - protein, 15 aa, Artificial Sequence
  Description of Artificial Sequence: Synthetic peptide
  Seed: SIGKVCRTLLAKSVF
SIIKVRRRLLLKSVF

SEQ ID NO: 267580 - protein, 15 aa, Artificial Sequence
  Description of Artificial Sequence: Synthetic peptide
  Seed: SIGKVCRTLLAKSVF
SIIKVRRRLLMKSVF

SEQ ID NO: 267581 - protein, 15 aa, Artificial Sequence
  Description of Artificial Sequence: Synthetic peptide
  Seed: SIGKVCRTLLAKSVF
SIIKVRRRLLNKSVF

SEQ ID NO: 267582 - protein, 15 aa, Artificial Sequence
  Description of Artificial Sequence: Synthetic peptide
  Seed: SIGKVCRTLLAKSVF
SIIKVRRRLLPKSVF

SEQ ID NO: 267583 - protein, 15 aa, Artificial Sequence
  Description of Artificial Sequence: Synthetic peptide
  Seed: SIGKVCRTLLAKSVF
SIIKVRRRLLQKSVF

SEQ ID NO: 267584 - protein, 15 aa, Artificial Sequence
  Description of Artificial Sequence: Synthetic peptide
  Seed: SIGKVCRTLLAKSVF
SIIKVRRRLLSKSVF

SEQ ID NO: 267585 - protein, 15 aa, Artificial Sequence
  Description of Artificial Sequence: Synthetic peptide
  Seed: SIGKVCRTLLAKSVF
SIIKVRRRLLTKSVF

SEQ ID NO: 267586 - protein, 15 aa, Artificial Sequence
  Description of Artificial Sequence: Synthetic peptide
  Seed: SIGKVCRTLLAKSVF
SIIKVRRRLLVKSVF

SEQ ID NO: 267587 - protein, 15 aa, Artificial Sequence
  Description of Artificial Sequence: Synthetic peptide
  Seed: SIGKVCRTLLAKSVF
SIIKVRRRLLYKSVF

SEQ ID NO: 267588 - protein, 15 aa, Artificial Sequence
  Description of Artificial Sequence: Synthetic peptide
  Seed: SIGKVCRTLLAKSVF
SIIKVRRSLLAKSVF

SEQ ID NO: 267589 - protein, 15 aa, Artificial Sequence
  Description of Artificial Sequence: Synthetic peptide
  Seed: SIGKVCRTLLAKSVF
SIIKVRRSLLCKSVF

SEQ ID NO: 267590 - protein, 15 aa, Artificial Sequence
  Description of Artificial Sequence: Synthetic peptide
  Seed: SIGKVCRTLLAKSVF
SIIKVRRSLLDKSVF

SEQ ID NO: 267591 - protein, 15 aa, Artificial Sequence
  Description of Artificial Sequence: Synthetic peptide
  Seed: SIGKVCRTLLAKSVF
SIIKVRRSLLEKSVF

SEQ ID NO: 267592 - protein, 15 aa, Artificial Sequence
  Description of Artificial Sequence: Synthetic peptide
  Seed: SIGKVCRTLLAKSVF
SIIKVRRSLLGKSVF

SEQ ID NO: 267593 - protein, 15 aa, Artificial Sequence
  Description of Artificial Sequence: Synthetic peptide
  Seed: SIGKVCRTLLAKSVF
SIIKVRRSLLHKSVF

SEQ ID NO: 267594 - protein, 15 aa, Artificial Sequence
  Description of Artificial Sequence: Synthetic peptide
  Seed: SIGKVCRTLLAKSVF
SIIKVRRSLLKKSVF

SEQ ID NO: 267595 - protein, 15 aa, Artificial Sequence
  Description of Artificial Sequence: Synthetic peptide
  Seed: SIGKVCRTLLAKSVF
SIIKVRRSLLMKSVF

SEQ ID NO: 267596 - protein, 15 aa, Artificial Sequence
  Description of Artificial Sequence: Synthetic peptide
  Seed: SIGKVCRTLLAKSVF
SIIKVRRSLLNKSVF

SEQ ID NO: 267597 - protein, 15 aa, Artificial Sequence
  Description of Artificial Sequence: Synthetic peptide
  Seed: SIGKVCRTLLAKSVF
SIIKVRRSLLPKSVF

SEQ ID NO: 267598 - protein, 15 aa, Artificial Sequence
  Description of Artificial Sequence: Synthetic peptide
  Seed: SIGKVCRTLLAKSVF
SIIKVRRSLLQKSVF

SEQ ID NO: 267599 - protein, 15 aa, Artificial Sequence
  Description of Artificial Sequence: Synthetic peptide
  Seed: SIGKVCRTLLAKSVF
SIIKVRRSLLRKSVF

SEQ ID NO: 267600 - protein, 15 aa, Artificial Sequence
  Description of Artificial Sequence: Synthetic peptide
  Seed: SIGKVCRTLLAKSVF
SIIKVRRSLLSKSVF

SEQ ID NO: 267601 - protein, 15 aa, Artificial Sequence
  Description of Artificial Sequence: Synthetic peptide
  Seed: SIGKVCRTLLAKSVF
SIIKVRRSLLTKSVF

SEQ ID NO: 267602 - protein, 15 aa, Artificial Sequence
  Description of Artificial Sequence: Synthetic peptide
  Seed: SIGKVCRTLLAKSVF
SIIKVRRSLLVKSVF

SEQ ID NO: 267603 - protein, 15 aa, Artificial Sequence
  Description of Artificial Sequence: Synthetic peptide
  Seed: SIGKVCRTLLAKSVF
SIIKVRRSLLYKSVF

SEQ ID NO: 267604 - protein, 15 aa, Artificial Sequence
  Description of Artificial Sequence: Synthetic peptide
  Seed: SIGKVCRTLLAKSVF
SIIKVRRTLLAKSVF

SEQ ID NO: 267605 - protein, 15 aa, Artificial Sequence
  Description of Artificial Sequence: Synthetic peptide
  Seed: SIGKVCRTLLAKSVF
SIIKVRRTLLCKSVF

SEQ ID NO: 267606 - protein, 15 aa, Artificial Sequence
  Description of Artificial Sequence: Synthetic peptide
  Seed: SIGKVCRTLLAKSVF
SIIKVRRTLLDKSVF

SEQ ID NO: 267607 - protein, 15 aa, Artificial Sequence
  Description of Artificial Sequence: Synthetic peptide
  Seed: SIGKVCRTLLAKSVF
SIIKVRRTLLEKSVF

SEQ ID NO: 267608 - protein, 15 aa, Artificial Sequence
  Description of Artificial Sequence: Synthetic peptide
  Seed: SIGKVCRTLLAKSVF
SIIKVRRTLLFKSVF

SEQ ID NO: 267609 - protein, 15 aa, Artificial Sequence
  Description of Artificial Sequence: Synthetic peptide
  Seed: SIGKVCRTLLAKSVF
SIIKVRRTLLGKSVF

SEQ ID NO: 267610 - protein, 15 aa, Artificial Sequence
  Description of Artificial Sequence: Synthetic peptide
  Seed: SIGKVCRTLLAKSVF
SIIKVRRTLLHKSVF

SEQ ID NO: 267611 - protein, 15 aa, Artificial Sequence
  Description of Artificial Sequence: Synthetic peptide
  Seed: SIGKVCRTLLAKSVF
SIIKVRRTLLIKSVF

SEQ ID NO: 267612 - protein, 15 aa, Artificial Sequence
  Description of Artificial Sequence: Synthetic peptide
  Seed: SIGKVCRTLLAKSVF
SIIKVRRTLLKKSVF

SEQ ID NO: 267613 - protein, 15 aa, Artificial Sequence
  Description of Artificial Sequence: Synthetic peptide
  Seed: SIGKVCRTLLAKSVF
SIIKVRRTLLLKSVF

SEQ ID NO: 267614 - protein, 15 aa, Artificial Sequence
  Description of Artificial Sequence: Synthetic peptide
  Seed: SIGKVCRTLLAKSVF
SIIKVRRTLLMKSVF

SEQ ID NO: 267615 - protein, 15 aa, Artificial Sequence
  Description of Artificial Sequence: Synthetic peptide
  Seed: SIGKVCRTLLAKSVF
SIIKVRRTLLNKSVF

SEQ ID NO: 267616 - protein, 15 aa, Artificial Sequence
  Description of Artificial Sequence: Synthetic peptide
  Seed: SIGKVCRTLLAKSVF
SIIKVRRTLLQKSVF

SEQ ID NO: 267617 - protein, 15 aa, Artificial Sequence
  Description of Artificial Sequence: Synthetic peptide
  Seed: SIGKVCRTLLAKSVF
SIIKVRRTLLRKSVF

SEQ ID NO: 267618 - protein, 15 aa, Artificial Sequence
  Description of Artificial Sequence: Synthetic peptide
  Seed: SIGKVCRTLLAKSVF
SIIKVRRTLLSKSVF

SEQ ID NO: 267619 - protein, 15 aa, Artificial Sequence
  Description of Artificial Sequence: Synthetic peptide
  Seed: SIGKVCRTLLAKSVF
SIIKVRRTLLTKSVF

SEQ ID NO: 267620 - protein, 15 aa, Artificial Sequence
  Description of Artificial Sequence: Synthetic peptide
  Seed: SIGKVCRTLLAKSVF
SIIKVRRTLLVKSVF

SEQ ID NO: 267621 - protein, 15 aa, Artificial Sequence
  Description of Artificial Sequence: Synthetic peptide
  Seed: SIGKVCRTLLAKSVF
SIIKVRRTLLYKSVF

SEQ ID NO: 267622 - protein, 15 aa, Artificial Sequence
  Description of Artificial Sequence: Synthetic peptide
  Seed: SIGKVCRTLLAKSVF
SIIKVRRVLLAKSVF

SEQ ID NO: 267623 - protein, 15 aa, Artificial Sequence
  Description of Artificial Sequence: Synthetic peptide
  Seed: SIGKVCRTLLAKSVF
SIIKVRRVLLDKSVF

SEQ ID NO: 267624 - protein, 15 aa, Artificial Sequence
  Description of Artificial Sequence: Synthetic peptide
  Seed: SIGKVCRTLLAKSVF
SIIKVRRVLLEKSVF

SEQ ID NO: 267625 - protein, 15 aa, Artificial Sequence
  Description of Artificial Sequence: Synthetic peptide
  Seed: SIGKVCRTLLAKSVF
SIIKVRRVLLGKSVF

SEQ ID NO: 267626 - protein, 15 aa, Artificial Sequence
  Description of Artificial Sequence: Synthetic peptide
  Seed: SIGKVCRTLLAKSVF
SIIKVRRVLLHKSVF

SEQ ID NO: 267627 - protein, 15 aa, Artificial Sequence
  Description of Artificial Sequence: Synthetic peptide
  Seed: SIGKVCRTLLAKSVF
SIIKVRRVLLKKSVF

SEQ ID NO: 267628 - protein, 15 aa, Artificial Sequence
  Description of Artificial Sequence: Synthetic peptide
  Seed: SIGKVCRTLLAKSVF
SIIKVRRVLLQKSVF

SEQ ID NO: 267629 - protein, 15 aa, Artificial Sequence
  Description of Artificial Sequence: Synthetic peptide
  Seed: SIGKVCRTLLAKSVF
SIIKVRRVLLRKSVF

SEQ ID NO: 267630 - protein, 15 aa, Artificial Sequence
  Description of Artificial Sequence: Synthetic peptide
  Seed: SIGKVCRTLLAKSVF
SIIKVRRVLLSKSVF

SEQ ID NO: 267631 - protein, 15 aa, Artificial Sequence
  Description of Artificial Sequence: Synthetic peptide
  Seed: SIGKVCRTLLAKSVF
SIIKVRRVLLYKSVF

SEQ ID NO: 267632 - protein, 15 aa, Artificial Sequence
  Description of Artificial Sequence: Synthetic peptide
  Seed: SIGKVCRTLLAKSVF
SIIKVSRALLAKSVF

SEQ ID NO: 267633 - protein, 15 aa, Artificial Sequence
  Description of Artificial Sequence: Synthetic peptide
  Seed: SIGKVCRTLLAKSVF
SIIKVSRALLGKSVF

SEQ ID NO: 267634 - protein, 15 aa, Artificial Sequence
  Description of Artificial Sequence: Synthetic peptide
  Seed: SIGKVCRTLLAKSVF
SIIKVSRALLHKSVF

SEQ ID NO: 267635 - protein, 15 aa, Artificial Sequence
  Description of Artificial Sequence: Synthetic peptide
  Seed: SIGKVCRTLLAKSVF
SIIKVSRALLKKSVF

SEQ ID NO: 267636 - protein, 15 aa, Artificial Sequence
  Description of Artificial Sequence: Synthetic peptide
  Seed: SIGKVCRTLLAKSVF
SIIKVSRALLQKSVF

SEQ ID NO: 267637 - protein, 15 aa, Artificial Sequence
  Description of Artificial Sequence: Synthetic peptide
  Seed: SIGKVCRTLLAKSVF
SIIKVSRALLRKSVF

SEQ ID NO: 267638 - protein, 15 aa, Artificial Sequence
  Description of Artificial Sequence: Synthetic peptide
  Seed: SIGKVCRTLLAKSVF
SIIKVSRALLSKSVF

SEQ ID NO: 267639 - protein, 15 aa, Artificial Sequence
  Description of Artificial Sequence: Synthetic peptide
  Seed: SIGKVCRTLLAKSVF
SIIKVSRALLVKSVF

SEQ ID NO: 267640 - protein, 15 aa, Artificial Sequence
  Description of Artificial Sequence: Synthetic peptide
  Seed: SIGKVCRTLLAKSVF
SIIKVSRALLYKSVF

SEQ ID NO: 267641 - protein, 15 aa, Artificial Sequence
  Description of Artificial Sequence: Synthetic peptide
  Seed: SIGKVCRTLLAKSVF
SIIKVSRDLLAKSVF

SEQ ID NO: 267642 - protein, 15 aa, Artificial Sequence
  Description of Artificial Sequence: Synthetic peptide
  Seed: SIGKVCRTLLAKSVF
SIIKVSRELLRKSVF

SEQ ID NO: 267643 - protein, 15 aa, Artificial Sequence
  Description of Artificial Sequence: Synthetic peptide
  Seed: SIGKVCRTLLAKSVF
SIIKVSRGLLAKSVF

SEQ ID NO: 267644 - protein, 15 aa, Artificial Sequence
  Description of Artificial Sequence: Synthetic peptide
  Seed: SIGKVCRTLLAKSVF
SIIKVSRGLLGKSVF

SEQ ID NO: 267645 - protein, 15 aa, Artificial Sequence
  Description of Artificial Sequence: Synthetic peptide
  Seed: SIGKVCRTLLAKSVF
SIIKVSRGLLQKSVF

SEQ ID NO: 267646 - protein, 15 aa, Artificial Sequence
  Description of Artificial Sequence: Synthetic peptide
  Seed: SIGKVCRTLLAKSVF
SIIKVSRGLLSKSVF

SEQ ID NO: 267647 - protein, 15 aa, Artificial Sequence
  Description of Artificial Sequence: Synthetic peptide
  Seed: SIGKVCRTLLAKSVF
SIIKVSRHLLAKSVF

SEQ ID NO: 267648 - protein, 15 aa, Artificial Sequence
  Description of Artificial Sequence: Synthetic peptide
  Seed: SIGKVCRTLLAKSVF
SIIKVSRHLLGKSVF

SEQ ID NO: 267649 - protein, 15 aa, Artificial Sequence
  Description of Artificial Sequence: Synthetic peptide
  Seed: SIGKVCRTLLAKSVF
SIIKVSRHLLHKSVF

SEQ ID NO: 267650 - protein, 15 aa, Artificial Sequence
  Description of Artificial Sequence: Synthetic peptide
  Seed: SIGKVCRTLLAKSVF
SIIKVSRHLLLKSVF

SEQ ID NO: 267651 - protein, 15 aa, Artificial Sequence
  Description of Artificial Sequence: Synthetic peptide
  Seed: SIGKVCRTLLAKSVF
SIIKVSRHLLMKSVF

SEQ ID NO: 267652 - protein, 15 aa, Artificial Sequence
  Description of Artificial Sequence: Synthetic peptide
  Seed: SIGKVCRTLLAKSVF
SIIKVSRHLLNKSVF

SEQ ID NO: 267653 - protein, 15 aa, Artificial Sequence
  Description of Artificial Sequence: Synthetic peptide
  Seed: SIGKVCRTLLAKSVF
SIIKVSRHLLQKSVF

SEQ ID NO: 267654 - protein, 15 aa, Artificial Sequence
  Description of Artificial Sequence: Synthetic peptide
  Seed: SIGKVCRTLLAKSVF
SIIKVSRHLLSKSVF

SEQ ID NO: 267655 - protein, 15 aa, Artificial Sequence
  Description of Artificial Sequence: Synthetic peptide
  Seed: SIGKVCRTLLAKSVF
SIIKVSRHLLTKSVF

SEQ ID NO: 267656 - protein, 15 aa, Artificial Sequence
  Description of Artificial Sequence: Synthetic peptide
  Seed: SIGKVCRTLLAKSVF
SIIKVSRHLLVKSVF

SEQ ID NO: 267657 - protein, 15 aa, Artificial Sequence
  Description of Artificial Sequence: Synthetic peptide
  Seed: SIGKVCRTLLAKSVF
SIIKVSRHLLYKSVF

SEQ ID NO: 267658 - protein, 15 aa, Artificial Sequence
  Description of Artificial Sequence: Synthetic peptide
  Seed: SIGKVCRTLLAKSVF
SIIKVSRILLAKSVF

SEQ ID NO: 267659 - protein, 15 aa, Artificial Sequence
  Description of Artificial Sequence: Synthetic peptide
  Seed: SIGKVCRTLLAKSVF
SIIKVSRILLGKSVF

SEQ ID NO: 267660 - protein, 15 aa, Artificial Sequence
  Description of Artificial Sequence: Synthetic peptide
  Seed: SIGKVCRTLLAKSVF
SIIKVSRILLQKSVF

SEQ ID NO: 267661 - protein, 15 aa, Artificial Sequence
  Description of Artificial Sequence: Synthetic peptide
  Seed: SIGKVCRTLLAKSVF
SIIKVSRILLSKSVF

SEQ ID NO: 267662 - protein, 15 aa, Artificial Sequence
  Description of Artificial Sequence: Synthetic peptide
  Seed: SIGKVCRTLLAKSVF
SIIKVSRKLLAKSVF

SEQ ID NO: 267663 - protein, 15 aa, Artificial Sequence
  Description of Artificial Sequence: Synthetic peptide
  Seed: SIGKVCRTLLAKSVF
SIIKVSRKLLCKSVF

SEQ ID NO: 267664 - protein, 15 aa, Artificial Sequence
  Description of Artificial Sequence: Synthetic peptide
  Seed: SIGKVCRTLLAKSVF
SIIKVSRKLLDKSVF

SEQ ID NO: 267665 - protein, 15 aa, Artificial Sequence
  Description of Artificial Sequence: Synthetic peptide
  Seed: SIGKVCRTLLAKSVF
SIIKVSRKLLEKSVF

SEQ ID NO: 267666 - protein, 15 aa, Artificial Sequence
  Description of Artificial Sequence: Synthetic peptide
  Seed: SIGKVCRTLLAKSVF
SIIKVSRKLLFKSVF

SEQ ID NO: 267667 - protein, 15 aa, Artificial Sequence
  Description of Artificial Sequence: Synthetic peptide
  Seed: SIGKVCRTLLAKSVF
SIIKVSRKLLGKSVF

SEQ ID NO: 267668 - protein, 15 aa, Artificial Sequence
  Description of Artificial Sequence: Synthetic peptide
  Seed: SIGKVCRTLLAKSVF
SIIKVSRKLLHKSVF

SEQ ID NO: 267669 - protein, 15 aa, Artificial Sequence
  Description of Artificial Sequence: Synthetic peptide
  Seed: SIGKVCRTLLAKSVF
SIIKVSRKLLIKSVF

SEQ ID NO: 267670 - protein, 15 aa, Artificial Sequence
  Description of Artificial Sequence: Synthetic peptide
  Seed: SIGKVCRTLLAKSVF
SIIKVSRKLLKKSVF

SEQ ID NO: 267671 - protein, 15 aa, Artificial Sequence
  Description of Artificial Sequence: Synthetic peptide
  Seed: SIGKVCRTLLAKSVF
SIIKVSRKLLLKSVF

SEQ ID NO: 267672 - protein, 15 aa, Artificial Sequence
  Description of Artificial Sequence: Synthetic peptide
  Seed: SIGKVCRTLLAKSVF
SIIKVSRKLLMKSVF

SEQ ID NO: 267673 - protein, 15 aa, Artificial Sequence
  Description of Artificial Sequence: Synthetic peptide
  Seed: SIGKVCRTLLAKSVF
SIIKVSRKLLNKSVF

SEQ ID NO: 267674 - protein, 15 aa, Artificial Sequence
  Description of Artificial Sequence: Synthetic peptide
  Seed: SIGKVCRTLLAKSVF
SIIKVSRKLLPKSVF

SEQ ID NO: 267675 - protein, 15 aa, Artificial Sequence
  Description of Artificial Sequence: Synthetic peptide
  Seed: SIGKVCRTLLAKSVF
SIIKVSRKLLQKSVF

SEQ ID NO: 267676 - protein, 15 aa, Artificial Sequence
  Description of Artificial Sequence: Synthetic peptide
  Seed: SIGKVCRTLLAKSVF
SIIKVSRKLLRKSVF

SEQ ID NO: 267677 - protein, 15 aa, Artificial Sequence
  Description of Artificial Sequence: Synthetic peptide
  Seed: SIGKVCRTLLAKSVF
SIIKVSRKLLSKSVF

SEQ ID NO: 267678 - protein, 15 aa, Artificial Sequence
  Description of Artificial Sequence: Synthetic peptide
  Seed: SIGKVCRTLLAKSVF
SIIKVSRKLLTKSVF

SEQ ID NO: 267679 - protein, 15 aa, Artificial Sequence
  Description of Artificial Sequence: Synthetic peptide
  Seed: SIGKVCRTLLAKSVF
SIIKVSRKLLVKSVF

SEQ ID NO: 267680 - protein, 15 aa, Artificial Sequence
  Description of Artificial Sequence: Synthetic peptide
  Seed: SIGKVCRTLLAKSVF
SIIKVSRKLLWKSVF

SEQ ID NO: 267681 - protein, 15 aa, Artificial Sequence
  Description of Artificial Sequence: Synthetic peptide
  Seed: SIGKVCRTLLAKSVF
SIIKVSRKLLYKSVF

SEQ ID NO: 267682 - protein, 15 aa, Artificial Sequence
  Description of Artificial Sequence: Synthetic peptide
  Seed: SIGKVCRTLLAKSVF
SIIKVSRNLLAKSVF

SEQ ID NO: 267683 - protein, 15 aa, Artificial Sequence
  Description of Artificial Sequence: Synthetic peptide
  Seed: SIGKVCRTLLAKSVF
SIIKVSRNLLGKSVF

SEQ ID NO: 267684 - protein, 15 aa, Artificial Sequence
  Description of Artificial Sequence: Synthetic peptide
  Seed: SIGKVCRTLLAKSVF
SIIKVSRNLLHKSVF

SEQ ID NO: 267685 - protein, 15 aa, Artificial Sequence
  Description of Artificial Sequence: Synthetic peptide
  Seed: SIGKVCRTLLAKSVF
SIIKVSRNLLMKSVF

SEQ ID NO: 267686 - protein, 15 aa, Artificial Sequence
  Description of Artificial Sequence: Synthetic peptide
  Seed: SIGKVCRTLLAKSVF
SIIKVSRNLLQKSVF

SEQ ID NO: 267687 - protein, 15 aa, Artificial Sequence
  Description of Artificial Sequence: Synthetic peptide
  Seed: SIGKVCRTLLAKSVF
SIIKVSRNLLSKSVF

SEQ ID NO: 267688 - protein, 15 aa, Artificial Sequence
  Description of Artificial Sequence: Synthetic peptide
  Seed: SIGKVCRTLLAKSVF
SIIKVSRNLLTKSVF

SEQ ID NO: 267689 - protein, 15 aa, Artificial Sequence
  Description of Artificial Sequence: Synthetic peptide
  Seed: SIGKVCRTLLAKSVF
SIIKVSRNLLVKSVF

SEQ ID NO: 267690 - protein, 15 aa, Artificial Sequence
  Description of Artificial Sequence: Synthetic peptide
  Seed: SIGKVCRTLLAKSVF
SIIKVSRNLLYKSVF

SEQ ID NO: 267691 - protein, 15 aa, Artificial Sequence
  Description of Artificial Sequence: Synthetic peptide
  Seed: SIGKVCRTLLAKSVF
SIIKVSRPLLAKSVF

SEQ ID NO: 267692 - protein, 15 aa, Artificial Sequence
  Description of Artificial Sequence: Synthetic peptide
  Seed: SIGKVCRTLLAKSVF
SIIKVSRPLLGKSVF

SEQ ID NO: 267693 - protein, 15 aa, Artificial Sequence
  Description of Artificial Sequence: Synthetic peptide
  Seed: SIGKVCRTLLAKSVF
SIIKVSRPLLQKSVF

SEQ ID NO: 267694 - protein, 15 aa, Artificial Sequence
  Description of Artificial Sequence: Synthetic peptide
  Seed: SIGKVCRTLLAKSVF
SIIKVSRPLLSKSVF

SEQ ID NO: 267695 - protein, 15 aa, Artificial Sequence
  Description of Artificial Sequence: Synthetic peptide
  Seed: SIGKVCRTLLAKSVF
SIIKVSRQLLAKSVF

SEQ ID NO: 267696 - protein, 15 aa, Artificial Sequence
  Description of Artificial Sequence: Synthetic peptide
  Seed: SIGKVCRTLLAKSVF
SIIKVSRQLLGKSVF

SEQ ID NO: 267697 - protein, 15 aa, Artificial Sequence
  Description of Artificial Sequence: Synthetic peptide
  Seed: SIGKVCRTLLAKSVF
SIIKVSRQLLQKSVF

SEQ ID NO: 267698 - protein, 15 aa, Artificial Sequence
  Description of Artificial Sequence: Synthetic peptide
  Seed: SIGKVCRTLLAKSVF
SIIKVSRQLLSKSVF

SEQ ID NO: 267699 - protein, 15 aa, Artificial Sequence
  Description of Artificial Sequence: Synthetic peptide
  Seed: SIGKVCRTLLAKSVF
SIIKVSRRLLAKSVF

SEQ ID NO: 267700 - protein, 15 aa, Artificial Sequence
  Description of Artificial Sequence: Synthetic peptide
  Seed: SIGKVCRTLLAKSVF
SIIKVSRRLLCKSVF

SEQ ID NO: 267701 - protein, 15 aa, Artificial Sequence
  Description of Artificial Sequence: Synthetic peptide
  Seed: SIGKVCRTLLAKSVF
SIIKVSRRLLDKSVF

SEQ ID NO: 267702 - protein, 15 aa, Artificial Sequence
  Description of Artificial Sequence: Synthetic peptide
  Seed: SIGKVCRTLLAKSVF
SIIKVSRRLLEKSVF

SEQ ID NO: 267703 - protein, 15 aa, Artificial Sequence
  Description of Artificial Sequence: Synthetic peptide
  Seed: SIGKVCRTLLAKSVF
SIIKVSRRLLFKSVF

SEQ ID NO: 267704 - protein, 15 aa, Artificial Sequence
  Description of Artificial Sequence: Synthetic peptide
  Seed: SIGKVCRTLLAKSVF
SIIKVSRRLLGKSVF

SEQ ID NO: 267705 - protein, 15 aa, Artificial Sequence
  Description of Artificial Sequence: Synthetic peptide
  Seed: SIGKVCRTLLAKSVF
SIIKVSRRLLHKSVF

SEQ ID NO: 267706 - protein, 15 aa, Artificial Sequence
  Description of Artificial Sequence: Synthetic peptide
  Seed: SIGKVCRTLLAKSVF
SIIKVSRRLLIKSVF

SEQ ID NO: 267707 - protein, 15 aa, Artificial Sequence
  Description of Artificial Sequence: Synthetic peptide
  Seed: SIGKVCRTLLAKSVF
SIIKVSRRLLKKSVF

SEQ ID NO: 267708 - protein, 15 aa, Artificial Sequence
  Description of Artificial Sequence: Synthetic peptide
  Seed: SIGKVCRTLLAKSVF
SIIKVSRRLLLKSVF

SEQ ID NO: 267709 - protein, 15 aa, Artificial Sequence
  Description of Artificial Sequence: Synthetic peptide
  Seed: SIGKVCRTLLAKSVF
SIIKVSRRLLMKSVF

SEQ ID NO: 267710 - protein, 15 aa, Artificial Sequence
  Description of Artificial Sequence: Synthetic peptide
  Seed: SIGKVCRTLLAKSVF
SIIKVSRRLLNKSVF

SEQ ID NO: 267711 - protein, 15 aa, Artificial Sequence
  Description of Artificial Sequence: Synthetic peptide
  Seed: SIGKVCRTLLAKSVF
SIIKVSRRLLPKSVF

SEQ ID NO: 267712 - protein, 15 aa, Artificial Sequence
  Description of Artificial Sequence: Synthetic peptide
  Seed: SIGKVCRTLLAKSVF
SIIKVSRRLLQKSVF

SEQ ID NO: 267713 - protein, 15 aa, Artificial Sequence
  Description of Artificial Sequence: Synthetic peptide
  Seed: SIGKVCRTLLAKSVF
SIIKVSRRLLRKSVF

SEQ ID NO: 267714 - protein, 15 aa, Artificial Sequence
  Description of Artificial Sequence: Synthetic peptide
  Seed: SIGKVCRTLLAKSVF
SIIKVSRRLLSKSVF

SEQ ID NO: 267715 - protein, 15 aa, Artificial Sequence
  Description of Artificial Sequence: Synthetic peptide
  Seed: SIGKVCRTLLAKSVF
SIIKVSRRLLTKSVF

SEQ ID NO: 267716 - protein, 15 aa, Artificial Sequence
  Description of Artificial Sequence: Synthetic peptide
  Seed: SIGKVCRTLLAKSVF
SIIKVSRRLLVKSVF

SEQ ID NO: 267717 - protein, 15 aa, Artificial Sequence
  Description of Artificial Sequence: Synthetic peptide
  Seed: SIGKVCRTLLAKSVF
SIIKVSRRLLWKSVF

SEQ ID NO: 267718 - protein, 15 aa, Artificial Sequence
  Description of Artificial Sequence: Synthetic peptide
  Seed: SIGKVCRTLLAKSVF
SIIKVSRRLLYKSVF

SEQ ID NO: 267719 - protein, 15 aa, Artificial Sequence
  Description of Artificial Sequence: Synthetic peptide
  Seed: SIGKVCRTLLAKSVF
SIIKVSRSLLAKSVF

SEQ ID NO: 267720 - protein, 15 aa, Artificial Sequence
  Description of Artificial Sequence: Synthetic peptide
  Seed: SIGKVCRTLLAKSVF
SIIKVSRSLLGKSVF

SEQ ID NO: 267721 - protein, 15 aa, Artificial Sequence
  Description of Artificial Sequence: Synthetic peptide
  Seed: SIGKVCRTLLAKSVF
SIIKVSRSLLHKSVF

SEQ ID NO: 267722 - protein, 15 aa, Artificial Sequence
  Description of Artificial Sequence: Synthetic peptide
  Seed: SIGKVCRTLLAKSVF
SIIKVSRSLLIKSVF

SEQ ID NO: 267723 - protein, 15 aa, Artificial Sequence
  Description of Artificial Sequence: Synthetic peptide
  Seed: SIGKVCRTLLAKSVF
SIIKVSRSLLLKSVF

SEQ ID NO: 267724 - protein, 15 aa, Artificial Sequence
  Description of Artificial Sequence: Synthetic peptide
  Seed: SIGKVCRTLLAKSVF
SIIKVSRSLLMKSVF

SEQ ID NO: 267725 - protein, 15 aa, Artificial Sequence
  Description of Artificial Sequence: Synthetic peptide
  Seed: SIGKVCRTLLAKSVF
SIIKVSRSLLNKSVF

SEQ ID NO: 267726 - protein, 15 aa, Artificial Sequence
  Description of Artificial Sequence: Synthetic peptide
  Seed: SIGKVCRTLLAKSVF
SIIKVSRSLLQKSVF

SEQ ID NO: 267727 - protein, 15 aa, Artificial Sequence
  Description of Artificial Sequence: Synthetic peptide
  Seed: SIGKVCRTLLAKSVF
SIIKVSRSLLRKSVF

SEQ ID NO: 267728 - protein, 15 aa, Artificial Sequence
  Description of Artificial Sequence: Synthetic peptide
  Seed: SIGKVCRTLLAKSVF
SIIKVSRSLLSKSVF

SEQ ID NO: 267729 - protein, 15 aa, Artificial Sequence
  Description of Artificial Sequence: Synthetic peptide
  Seed: SIGKVCRTLLAKSVF
SIIKVSRSLLTKSVF

SEQ ID NO: 267730 - protein, 15 aa, Artificial Sequence
  Description of Artificial Sequence: Synthetic peptide
  Seed: SIGKVCRTLLAKSVF
SIIKVSRSLLVKSVF

SEQ ID NO: 267731 - protein, 15 aa, Artificial Sequence
  Description of Artificial Sequence: Synthetic peptide
  Seed: SIGKVCRTLLAKSVF
SIIKVSRSLLYKSVF

SEQ ID NO: 267732 - protein, 15 aa, Artificial Sequence
  Description of Artificial Sequence: Synthetic peptide
  Seed: SIGKVCRTLLAKSVF
SIIKVSRTLLAKSVF

SEQ ID NO: 267733 - protein, 15 aa, Artificial Sequence
  Description of Artificial Sequence: Synthetic peptide
  Seed: SIGKVCRTLLAKSVF
SIIKVSRTLLGKSVF

SEQ ID NO: 267734 - protein, 15 aa, Artificial Sequence
  Description of Artificial Sequence: Synthetic peptide
  Seed: SIGKVCRTLLAKSVF
SIIKVSRTLLHKSVF

SEQ ID NO: 267735 - protein, 15 aa, Artificial Sequence
  Description of Artificial Sequence: Synthetic peptide
  Seed: SIGKVCRTLLAKSVF
SIIKVSRTLLIKSVF

SEQ ID NO: 267736 - protein, 15 aa, Artificial Sequence
  Description of Artificial Sequence: Synthetic peptide
  Seed: SIGKVCRTLLAKSVF
SIIKVSRTLLKKSVF

SEQ ID NO: 267737 - protein, 15 aa, Artificial Sequence
  Description of Artificial Sequence: Synthetic peptide
  Seed: SIGKVCRTLLAKSVF
SIIKVSRTLLMKSVF

SEQ ID NO: 267738 - protein, 15 aa, Artificial Sequence
  Description of Artificial Sequence: Synthetic peptide
  Seed: SIGKVCRTLLAKSVF
SIIKVSRTLLNKSVF

SEQ ID NO: 267739 - protein, 15 aa, Artificial Sequence
  Description of Artificial Sequence: Synthetic peptide
  Seed: SIGKVCRTLLAKSVF
SIIKVSRTLLQKSVF

SEQ ID NO: 267740 - protein, 15 aa, Artificial Sequence
  Description of Artificial Sequence: Synthetic peptide
  Seed: SIGKVCRTLLAKSVF
SIIKVSRTLLRKSVF

SEQ ID NO: 267741 - protein, 15 aa, Artificial Sequence
  Description of Artificial Sequence: Synthetic peptide
  Seed: SIGKVCRTLLAKSVF
SIIKVSRTLLSKSVF

SEQ ID NO: 267742 - protein, 15 aa, Artificial Sequence
  Description of Artificial Sequence: Synthetic peptide
  Seed: SIGKVCRTLLAKSVF
SIIKVSRTLLTKSVF

SEQ ID NO: 267743 - protein, 15 aa, Artificial Sequence
  Description of Artificial Sequence: Synthetic peptide
  Seed: SIGKVCRTLLAKSVF
SIIKVSRTLLVKSVF

SEQ ID NO: 267744 - protein, 15 aa, Artificial Sequence
  Description of Artificial Sequence: Synthetic peptide
  Seed: SIGKVCRTLLAKSVF
SIIKVSRTLLYKSVF

SEQ ID NO: 267745 - protein, 15 aa, Artificial Sequence
  Description of Artificial Sequence: Synthetic peptide
  Seed: SIGKVCRTLLAKSVF
SIIKVSRVLLAKSVF

SEQ ID NO: 267746 - protein, 15 aa, Artificial Sequence
  Description of Artificial Sequence: Synthetic peptide
  Seed: SIGKVCRTLLAKSVF
SIIKVSRVLLGKSVF

SEQ ID NO: 267747 - protein, 15 aa, Artificial Sequence
  Description of Artificial Sequence: Synthetic peptide
  Seed: SIGKVCRTLLAKSVF
SIIKVSRVLLHKSVF

SEQ ID NO: 267748 - protein, 15 aa, Artificial Sequence
  Description of Artificial Sequence: Synthetic peptide
  Seed: SIGKVCRTLLAKSVF
SIIKVSRVLLKKSVF

SEQ ID NO: 267749 - protein, 15 aa, Artificial Sequence
  Description of Artificial Sequence: Synthetic peptide
  Seed: SIGKVCRTLLAKSVF
SIIKVSRVLLQKSVF

SEQ ID NO: 267750 - protein, 15 aa, Artificial Sequence
  Description of Artificial Sequence: Synthetic peptide
  Seed: SIGKVCRTLLAKSVF
SIIKVSRVLLRKSVF

SEQ ID NO: 267751 - protein, 15 aa, Artificial Sequence
  Description of Artificial Sequence: Synthetic peptide
  Seed: SIGKVCRTLLAKSVF
SIIKVSRVLLSKSVF

SEQ ID NO: 267752 - protein, 15 aa, Artificial Sequence
  Description of Artificial Sequence: Synthetic peptide
  Seed: SIGKVCRTLLAKSVF
SIIKVTRALLAKSVF

SEQ ID NO: 267753 - protein, 15 aa, Artificial Sequence
  Description of Artificial Sequence: Synthetic peptide
  Seed: SIGKVCRTLLAKSVF
SIIKVTRALLGKSVF

SEQ ID NO: 267754 - protein, 15 aa, Artificial Sequence
  Description of Artificial Sequence: Synthetic peptide
  Seed: SIGKVCRTLLAKSVF
SIIKVTRALLHKSVF

SEQ ID NO: 267755 - protein, 15 aa, Artificial Sequence
  Description of Artificial Sequence: Synthetic peptide
  Seed: SIGKVCRTLLAKSVF
SIIKVTRALLIKSVF

SEQ ID NO: 267756 - protein, 15 aa, Artificial Sequence
  Description of Artificial Sequence: Synthetic peptide
  Seed: SIGKVCRTLLAKSVF
SIIKVTRALLKKSVF

SEQ ID NO: 267757 - protein, 15 aa, Artificial Sequence
  Description of Artificial Sequence: Synthetic peptide
  Seed: SIGKVCRTLLAKSVF
SIIKVTRALLQKSVF

SEQ ID NO: 267758 - protein, 15 aa, Artificial Sequence
  Description of Artificial Sequence: Synthetic peptide
  Seed: SIGKVCRTLLAKSVF
SIIKVTRALLRKSVF

SEQ ID NO: 267759 - protein, 15 aa, Artificial Sequence
  Description of Artificial Sequence: Synthetic peptide
  Seed: SIGKVCRTLLAKSVF
SIIKVTRALLSKSVF

SEQ ID NO: 267760 - protein, 15 aa, Artificial Sequence
  Description of Artificial Sequence: Synthetic peptide
  Seed: SIGKVCRTLLAKSVF
SIIKVTRALLVKSVF

SEQ ID NO: 267761 - protein, 15 aa, Artificial Sequence
  Description of Artificial Sequence: Synthetic peptide
  Seed: SIGKVCRTLLAKSVF
SIIKVTRALLYKSVF

SEQ ID NO: 267762 - protein, 15 aa, Artificial Sequence
  Description of Artificial Sequence: Synthetic peptide
  Seed: SIGKVCRTLLAKSVF
SIIKVTRELLRKSVF

SEQ ID NO: 267763 - protein, 15 aa, Artificial Sequence
  Description of Artificial Sequence: Synthetic peptide
  Seed: SIGKVCRTLLAKSVF
SIIKVTRGLLAKSVF

SEQ ID NO: 267764 - protein, 15 aa, Artificial Sequence
  Description of Artificial Sequence: Synthetic peptide
  Seed: SIGKVCRTLLAKSVF
SIIKVTRGLLGKSVF

SEQ ID NO: 267765 - protein, 15 aa, Artificial Sequence
  Description of Artificial Sequence: Synthetic peptide
  Seed: SIGKVCRTLLAKSVF
SIIKVTRGLLQKSVF

SEQ ID NO: 267766 - protein, 15 aa, Artificial Sequence
  Description of Artificial Sequence: Synthetic peptide
  Seed: SIGKVCRTLLAKSVF
SIIKVTRGLLSKSVF

SEQ ID NO: 267767 - protein, 15 aa, Artificial Sequence
  Description of Artificial Sequence: Synthetic peptide
  Seed: SIGKVCRTLLAKSVF
SIIKVTRHLLAKSVF

SEQ ID NO: 267768 - protein, 15 aa, Artificial Sequence
  Description of Artificial Sequence: Synthetic peptide
  Seed: SIGKVCRTLLAKSVF
SIIKVTRHLLGKSVF

SEQ ID NO: 267769 - protein, 15 aa, Artificial Sequence
  Description of Artificial Sequence: Synthetic peptide
  Seed: SIGKVCRTLLAKSVF
SIIKVTRHLLHKSVF

SEQ ID NO: 267770 - protein, 15 aa, Artificial Sequence
  Description of Artificial Sequence: Synthetic peptide
  Seed: SIGKVCRTLLAKSVF
SIIKVTRHLLIKSVF

SEQ ID NO: 267771 - protein, 15 aa, Artificial Sequence
  Description of Artificial Sequence: Synthetic peptide
  Seed: SIGKVCRTLLAKSVF
SIIKVTRHLLLKSVF

SEQ ID NO: 267772 - protein, 15 aa, Artificial Sequence
  Description of Artificial Sequence: Synthetic peptide
  Seed: SIGKVCRTLLAKSVF
SIIKVTRHLLMKSVF

SEQ ID NO: 267773 - protein, 15 aa, Artificial Sequence
  Description of Artificial Sequence: Synthetic peptide
  Seed: SIGKVCRTLLAKSVF
SIIKVTRHLLNKSVF

SEQ ID NO: 267774 - protein, 15 aa, Artificial Sequence
  Description of Artificial Sequence: Synthetic peptide
  Seed: SIGKVCRTLLAKSVF
SIIKVTRHLLQKSVF

SEQ ID NO: 267775 - protein, 15 aa, Artificial Sequence
  Description of Artificial Sequence: Synthetic peptide
  Seed: SIGKVCRTLLAKSVF
SIIKVTRHLLRKSVF

SEQ ID NO: 267776 - protein, 15 aa, Artificial Sequence
  Description of Artificial Sequence: Synthetic peptide
  Seed: SIGKVCRTLLAKSVF
SIIKVTRHLLSKSVF

SEQ ID NO: 267777 - protein, 15 aa, Artificial Sequence
  Description of Artificial Sequence: Synthetic peptide
  Seed: SIGKVCRTLLAKSVF
SIIKVTRHLLTKSVF

SEQ ID NO: 267778 - protein, 15 aa, Artificial Sequence
  Description of Artificial Sequence: Synthetic peptide
  Seed: SIGKVCRTLLAKSVF
SIIKVTRHLLVKSVF

SEQ ID NO: 267779 - protein, 15 aa, Artificial Sequence
  Description of Artificial Sequence: Synthetic peptide
  Seed: SIGKVCRTLLAKSVF
SIIKVTRHLLYKSVF

SEQ ID NO: 267780 - protein, 15 aa, Artificial Sequence
  Description of Artificial Sequence: Synthetic peptide
  Seed: SIGKVCRTLLAKSVF
SIIKVTRILLHKSVF

SEQ ID NO: 267781 - protein, 15 aa, Artificial Sequence
  Description of Artificial Sequence: Synthetic peptide
  Seed: SIGKVCRTLLAKSVF
SIIKVTRILLRKSVF

SEQ ID NO: 267782 - protein, 15 aa, Artificial Sequence
  Description of Artificial Sequence: Synthetic peptide
  Seed: SIGKVCRTLLAKSVF
SIIKVTRILLSKSVF

SEQ ID NO: 267783 - protein, 15 aa, Artificial Sequence
  Description of Artificial Sequence: Synthetic peptide
  Seed: SIGKVCRTLLAKSVF
SIIKVTRKLLAKSVF

SEQ ID NO: 267784 - protein, 15 aa, Artificial Sequence
  Description of Artificial Sequence: Synthetic peptide
  Seed: SIGKVCRTLLAKSVF
SIIKVTRKLLCKSVF

SEQ ID NO: 267785 - protein, 15 aa, Artificial Sequence
  Description of Artificial Sequence: Synthetic peptide
  Seed: SIGKVCRTLLAKSVF
SIIKVTRKLLDKSVF

SEQ ID NO: 267786 - protein, 15 aa, Artificial Sequence
  Description of Artificial Sequence: Synthetic peptide
  Seed: SIGKVCRTLLAKSVF
SIIKVTRKLLEKSVF

SEQ ID NO: 267787 - protein, 15 aa, Artificial Sequence
  Description of Artificial Sequence: Synthetic peptide
  Seed: SIGKVCRTLLAKSVF
SIIKVTRKLLFKSVF

SEQ ID NO: 267788 - protein, 15 aa, Artificial Sequence
  Description of Artificial Sequence: Synthetic peptide
  Seed: SIGKVCRTLLAKSVF
SIIKVTRKLLGKSVF

SEQ ID NO: 267789 - protein, 15 aa, Artificial Sequence
  Description of Artificial Sequence: Synthetic peptide
  Seed: SIGKVCRTLLAKSVF
SIIKVTRKLLHKSVF

SEQ ID NO: 267790 - protein, 15 aa, Artificial Sequence
  Description of Artificial Sequence: Synthetic peptide
  Seed: SIGKVCRTLLAKSVF
SIIKVTRKLLIKSVF

SEQ ID NO: 267791 - protein, 15 aa, Artificial Sequence
  Description of Artificial Sequence: Synthetic peptide
  Seed: SIGKVCRTLLAKSVF
SIIKVTRKLLKKSVF

SEQ ID NO: 267792 - protein, 15 aa, Artificial Sequence
  Description of Artificial Sequence: Synthetic peptide
  Seed: SIGKVCRTLLAKSVF
SIIKVTRKLLLKSVF

SEQ ID NO: 267793 - protein, 15 aa, Artificial Sequence
  Description of Artificial Sequence: Synthetic peptide
  Seed: SIGKVCRTLLAKSVF
SIIKVTRKLLMKSVF

SEQ ID NO: 267794 - protein, 15 aa, Artificial Sequence
  Description of Artificial Sequence: Synthetic peptide
  Seed: SIGKVCRTLLAKSVF
SIIKVTRKLLNKSVF

SEQ ID NO: 267795 - protein, 15 aa, Artificial Sequence
  Description of Artificial Sequence: Synthetic peptide
  Seed: SIGKVCRTLLAKSVF
SIIKVTRKLLPKSVF

SEQ ID NO: 267796 - protein, 15 aa, Artificial Sequence
  Description of Artificial Sequence: Synthetic peptide
  Seed: SIGKVCRTLLAKSVF
SIIKVTRKLLQKSVF

SEQ ID NO: 267797 - protein, 15 aa, Artificial Sequence
  Description of Artificial Sequence: Synthetic peptide
  Seed: SIGKVCRTLLAKSVF
SIIKVTRKLLRKSVF

SEQ ID NO: 267798 - protein, 15 aa, Artificial Sequence
  Description of Artificial Sequence: Synthetic peptide
  Seed: SIGKVCRTLLAKSVF
SIIKVTRKLLSKSVF

SEQ ID NO: 267799 - protein, 15 aa, Artificial Sequence
  Description of Artificial Sequence: Synthetic peptide
  Seed: SIGKVCRTLLAKSVF
SIIKVTRKLLTKSVF

SEQ ID NO: 267800 - protein, 15 aa, Artificial Sequence
  Description of Artificial Sequence: Synthetic peptide
  Seed: SIGKVCRTLLAKSVF
SIIKVTRKLLVKSVF

SEQ ID NO: 267801 - protein, 15 aa, Artificial Sequence
  Description of Artificial Sequence: Synthetic peptide
  Seed: SIGKVCRTLLAKSVF
SIIKVTRKLLWKSVF

SEQ ID NO: 267802 - protein, 15 aa, Artificial Sequence
  Description of Artificial Sequence: Synthetic peptide
  Seed: SIGKVCRTLLAKSVF
SIIKVTRKLLYKSVF

SEQ ID NO: 267803 - protein, 15 aa, Artificial Sequence
  Description of Artificial Sequence: Synthetic peptide
  Seed: SIGKVCRTLLAKSVF
SIIKVTRNLLAKSVF

SEQ ID NO: 267804 - protein, 15 aa, Artificial Sequence
  Description of Artificial Sequence: Synthetic peptide
  Seed: SIGKVCRTLLAKSVF
SIIKVTRNLLGKSVF

SEQ ID NO: 267805 - protein, 15 aa, Artificial Sequence
  Description of Artificial Sequence: Synthetic peptide
  Seed: SIGKVCRTLLAKSVF
SIIKVTRNLLHKSVF

SEQ ID NO: 267806 - protein, 15 aa, Artificial Sequence
  Description of Artificial Sequence: Synthetic peptide
  Seed: SIGKVCRTLLAKSVF
SIIKVTRNLLMKSVF

SEQ ID NO: 267807 - protein, 15 aa, Artificial Sequence
  Description of Artificial Sequence: Synthetic peptide
  Seed: SIGKVCRTLLAKSVF
SIIKVTRNLLNKSVF

SEQ ID NO: 267808 - protein, 15 aa, Artificial Sequence
  Description of Artificial Sequence: Synthetic peptide
  Seed: SIGKVCRTLLAKSVF
SIIKVTRNLLQKSVF

SEQ ID NO: 267809 - protein, 15 aa, Artificial Sequence
  Description of Artificial Sequence: Synthetic peptide
  Seed: SIGKVCRTLLAKSVF
SIIKVTRNLLRKSVF

SEQ ID NO: 267810 - protein, 15 aa, Artificial Sequence
  Description of Artificial Sequence: Synthetic peptide
  Seed: SIGKVCRTLLAKSVF
SIIKVTRNLLSKSVF

SEQ ID NO: 267811 - protein, 15 aa, Artificial Sequence
  Description of Artificial Sequence: Synthetic peptide
  Seed: SIGKVCRTLLAKSVF
SIIKVTRNLLTKSVF

SEQ ID NO: 267812 - protein, 15 aa, Artificial Sequence
  Description of Artificial Sequence: Synthetic peptide
  Seed: SIGKVCRTLLAKSVF
SIIKVTRNLLVKSVF

SEQ ID NO: 267813 - protein, 15 aa, Artificial Sequence
  Description of Artificial Sequence: Synthetic peptide
  Seed: SIGKVCRTLLAKSVF
SIIKVTRNLLYKSVF

SEQ ID NO: 267814 - protein, 15 aa, Artificial Sequence
  Description of Artificial Sequence: Synthetic peptide
  Seed: SIGKVCRTLLAKSVF
SIIKVTRPLLAKSVF

SEQ ID NO: 267815 - protein, 15 aa, Artificial Sequence
  Description of Artificial Sequence: Synthetic peptide
  Seed: SIGKVCRTLLAKSVF
SIIKVTRPLLGKSVF

SEQ ID NO: 267816 - protein, 15 aa, Artificial Sequence
  Description of Artificial Sequence: Synthetic peptide
  Seed: SIGKVCRTLLAKSVF
SIIKVTRPLLQKSVF

SEQ ID NO: 267817 - protein, 15 aa, Artificial Sequence
  Description of Artificial Sequence: Synthetic peptide
  Seed: SIGKVCRTLLAKSVF
SIIKVTRPLLSKSVF

SEQ ID NO: 267818 - protein, 15 aa, Artificial Sequence
  Description of Artificial Sequence: Synthetic peptide
  Seed: SIGKVCRTLLAKSVF
SIIKVTRQLLAKSVF

SEQ ID NO: 267819 - protein, 15 aa, Artificial Sequence
  Description of Artificial Sequence: Synthetic peptide
  Seed: SIGKVCRTLLAKSVF
SIIKVTRQLLGKSVF

SEQ ID NO: 267820 - protein, 15 aa, Artificial Sequence
  Description of Artificial Sequence: Synthetic peptide
  Seed: SIGKVCRTLLAKSVF
SIIKVTRQLLHKSVF

SEQ ID NO: 267821 - protein, 15 aa, Artificial Sequence
  Description of Artificial Sequence: Synthetic peptide
  Seed: SIGKVCRTLLAKSVF
SIIKVTRQLLQKSVF

SEQ ID NO: 267822 - protein, 15 aa, Artificial Sequence
  Description of Artificial Sequence: Synthetic peptide
  Seed: SIGKVCRTLLAKSVF
SIIKVTRQLLRKSVF

SEQ ID NO: 267823 - protein, 15 aa, Artificial Sequence
  Description of Artificial Sequence: Synthetic peptide
  Seed: SIGKVCRTLLAKSVF
SIIKVTRQLLSKSVF

SEQ ID NO: 267824 - protein, 15 aa, Artificial Sequence
  Description of Artificial Sequence: Synthetic peptide
  Seed: SIGKVCRTLLAKSVF
SIIKVTRQLLYKSVF

SEQ ID NO: 267825 - protein, 15 aa, Artificial Sequence
  Description of Artificial Sequence: Synthetic peptide
  Seed: SIGKVCRTLLAKSVF
SIIKVTRRLLAKSVF

SEQ ID NO: 267826 - protein, 15 aa, Artificial Sequence
  Description of Artificial Sequence: Synthetic peptide
  Seed: SIGKVCRTLLAKSVF
SIIKVTRRLLCKSVF

SEQ ID NO: 267827 - protein, 15 aa, Artificial Sequence
  Description of Artificial Sequence: Synthetic peptide
  Seed: SIGKVCRTLLAKSVF
SIIKVTRRLLDKSVF

SEQ ID NO: 267828 - protein, 15 aa, Artificial Sequence
  Description of Artificial Sequence: Synthetic peptide
  Seed: SIGKVCRTLLAKSVF
SIIKVTRRLLEKSVF

SEQ ID NO: 267829 - protein, 15 aa, Artificial Sequence
  Description of Artificial Sequence: Synthetic peptide
  Seed: SIGKVCRTLLAKSVF
SIIKVTRRLLFKSVF

SEQ ID NO: 267830 - protein, 15 aa, Artificial Sequence
  Description of Artificial Sequence: Synthetic peptide
  Seed: SIGKVCRTLLAKSVF
SIIKVTRRLLGKSVF

SEQ ID NO: 267831 - protein, 15 aa, Artificial Sequence
  Description of Artificial Sequence: Synthetic peptide
  Seed: SIGKVCRTLLAKSVF
SIIKVTRRLLHKSVF

SEQ ID NO: 267832 - protein, 15 aa, Artificial Sequence
  Description of Artificial Sequence: Synthetic peptide
  Seed: SIGKVCRTLLAKSVF
SIIKVTRRLLIKSVF

SEQ ID NO: 267833 - protein, 15 aa, Artificial Sequence
  Description of Artificial Sequence: Synthetic peptide
  Seed: SIGKVCRTLLAKSVF
SIIKVTRRLLKKSVF

SEQ ID NO: 267834 - protein, 15 aa, Artificial Sequence
  Description of Artificial Sequence: Synthetic peptide
  Seed: SIGKVCRTLLAKSVF
SIIKVTRRLLLKSVF

SEQ ID NO: 267835 - protein, 15 aa, Artificial Sequence
  Description of Artificial Sequence: Synthetic peptide
  Seed: SIGKVCRTLLAKSVF
SIIKVTRRLLMKSVF

SEQ ID NO: 267836 - protein, 15 aa, Artificial Sequence
  Description of Artificial Sequence: Synthetic peptide
  Seed: SIGKVCRTLLAKSVF
SIIKVTRRLLNKSVF

SEQ ID NO: 267837 - protein, 15 aa, Artificial Sequence
  Description of Artificial Sequence: Synthetic peptide
  Seed: SIGKVCRTLLAKSVF
SIIKVTRRLLPKSVF

SEQ ID NO: 267838 - protein, 15 aa, Artificial Sequence
  Description of Artificial Sequence: Synthetic peptide
  Seed: SIGKVCRTLLAKSVF
SIIKVTRRLLQKSVF

SEQ ID NO: 267839 - protein, 15 aa, Artificial Sequence
  Description of Artificial Sequence: Synthetic peptide
  Seed: SIGKVCRTLLAKSVF
SIIKVTRRLLRKSVF

SEQ ID NO: 267840 - protein, 15 aa, Artificial Sequence
  Description of Artificial Sequence: Synthetic peptide
  Seed: SIGKVCRTLLAKSVF
SIIKVTRRLLSKSVF

SEQ ID NO: 267841 - protein, 15 aa, Artificial Sequence
  Description of Artificial Sequence: Synthetic peptide
  Seed: SIGKVCRTLLAKSVF
SIIKVTRRLLTKSVF

SEQ ID NO: 267842 - protein, 15 aa, Artificial Sequence
  Description of Artificial Sequence: Synthetic peptide
  Seed: SIGKVCRTLLAKSVF
SIIKVTRRLLVKSVF

SEQ ID NO: 267843 - protein, 15 aa, Artificial Sequence
  Description of Artificial Sequence: Synthetic peptide
  Seed: SIGKVCRTLLAKSVF
SIIKVTRRLLYKSVF

SEQ ID NO: 267844 - protein, 15 aa, Artificial Sequence
  Description of Artificial Sequence: Synthetic peptide
  Seed: SIGKVCRTLLAKSVF
SIIKVTRSLLAKSVF

SEQ ID NO: 267845 - protein, 15 aa, Artificial Sequence
  Description of Artificial Sequence: Synthetic peptide
  Seed: SIGKVCRTLLAKSVF
SIIKVTRSLLGKSVF

SEQ ID NO: 267846 - protein, 15 aa, Artificial Sequence
  Description of Artificial Sequence: Synthetic peptide
  Seed: SIGKVCRTLLAKSVF
SIIKVTRSLLHKSVF

SEQ ID NO: 267847 - protein, 15 aa, Artificial Sequence
  Description of Artificial Sequence: Synthetic peptide
  Seed: SIGKVCRTLLAKSVF
SIIKVTRSLLIKSVF

SEQ ID NO: 267848 - protein, 15 aa, Artificial Sequence
  Description of Artificial Sequence: Synthetic peptide
  Seed: SIGKVCRTLLAKSVF
SIIKVTRSLLKKSVF

SEQ ID NO: 267849 - protein, 15 aa, Artificial Sequence
  Description of Artificial Sequence: Synthetic peptide
  Seed: SIGKVCRTLLAKSVF
SIIKVTRSLLLKSVF

SEQ ID NO: 267850 - protein, 15 aa, Artificial Sequence
  Description of Artificial Sequence: Synthetic peptide
  Seed: SIGKVCRTLLAKSVF
SIIKVTRSLLMKSVF

SEQ ID NO: 267851 - protein, 15 aa, Artificial Sequence
  Description of Artificial Sequence: Synthetic peptide
  Seed: SIGKVCRTLLAKSVF
SIIKVTRSLLNKSVF

SEQ ID NO: 267852 - protein, 15 aa, Artificial Sequence
  Description of Artificial Sequence: Synthetic peptide
  Seed: SIGKVCRTLLAKSVF
SIIKVTRSLLQKSVF

SEQ ID NO: 267853 - protein, 15 aa, Artificial Sequence
  Description of Artificial Sequence: Synthetic peptide
  Seed: SIGKVCRTLLAKSVF
SIIKVTRSLLRKSVF

SEQ ID NO: 267854 - protein, 15 aa, Artificial Sequence
  Description of Artificial Sequence: Synthetic peptide
  Seed: SIGKVCRTLLAKSVF
SIIKVTRSLLSKSVF

SEQ ID NO: 267855 - protein, 15 aa, Artificial Sequence
  Description of Artificial Sequence: Synthetic peptide
  Seed: SIGKVCRTLLAKSVF
SIIKVTRSLLTKSVF

SEQ ID NO: 267856 - protein, 15 aa, Artificial Sequence
  Description of Artificial Sequence: Synthetic peptide
  Seed: SIGKVCRTLLAKSVF
SIIKVTRSLLVKSVF

SEQ ID NO: 267857 - protein, 15 aa, Artificial Sequence
  Description of Artificial Sequence: Synthetic peptide
  Seed: SIGKVCRTLLAKSVF
SIIKVTRSLLYKSVF

SEQ ID NO: 267858 - protein, 15 aa, Artificial Sequence
  Description of Artificial Sequence: Synthetic peptide
  Seed: SIGKVCRTLLAKSVF
SIIKVTRTLLAKSVF

SEQ ID NO: 267859 - protein, 15 aa, Artificial Sequence
  Description of Artificial Sequence: Synthetic peptide
  Seed: SIGKVCRTLLAKSVF
SIIKVTRTLLGKSVF

SEQ ID NO: 267860 - protein, 15 aa, Artificial Sequence
  Description of Artificial Sequence: Synthetic peptide
  Seed: SIGKVCRTLLAKSVF
SIIKVTRTLLHKSVF

SEQ ID NO: 267861 - protein, 15 aa, Artificial Sequence
  Description of Artificial Sequence: Synthetic peptide
  Seed: SIGKVCRTLLAKSVF
SIIKVTRTLLKKSVF

SEQ ID NO: 267862 - protein, 15 aa, Artificial Sequence
  Description of Artificial Sequence: Synthetic peptide
  Seed: SIGKVCRTLLAKSVF
SIIKVTRTLLMKSVF

SEQ ID NO: 267863 - protein, 15 aa, Artificial Sequence
  Description of Artificial Sequence: Synthetic peptide
  Seed: SIGKVCRTLLAKSVF
SIIKVTRTLLNKSVF

SEQ ID NO: 267864 - protein, 15 aa, Artificial Sequence
  Description of Artificial Sequence: Synthetic peptide
  Seed: SIGKVCRTLLAKSVF
SIIKVTRTLLQKSVF

SEQ ID NO: 267865 - protein, 15 aa, Artificial Sequence
  Description of Artificial Sequence: Synthetic peptide
  Seed: SIGKVCRTLLAKSVF
SIIKVTRTLLRKSVF

SEQ ID NO: 267866 - protein, 15 aa, Artificial Sequence
  Description of Artificial Sequence: Synthetic peptide
  Seed: SIGKVCRTLLAKSVF
SIIKVTRTLLSKSVF

SEQ ID NO: 267867 - protein, 15 aa, Artificial Sequence
  Description of Artificial Sequence: Synthetic peptide
  Seed: SIGKVCRTLLAKSVF
SIIKVTRTLLTKSVF

SEQ ID NO: 267868 - protein, 15 aa, Artificial Sequence
  Description of Artificial Sequence: Synthetic peptide
  Seed: SIGKVCRTLLAKSVF
SIIKVTRTLLVKSVF

SEQ ID NO: 267869 - protein, 15 aa, Artificial Sequence
  Description of Artificial Sequence: Synthetic peptide
  Seed: SIGKVCRTLLAKSVF
SIIKVTRTLLYKSVF

SEQ ID NO: 267870 - protein, 15 aa, Artificial Sequence
  Description of Artificial Sequence: Synthetic peptide
  Seed: SIGKVCRTLLAKSVF
SIIKVTRVLLHKSVF

SEQ ID NO: 267871 - protein, 15 aa, Artificial Sequence
  Description of Artificial Sequence: Synthetic peptide
  Seed: SIGKVCRTLLAKSVF
SIIKVTRVLLKKSVF

SEQ ID NO: 267872 - protein, 15 aa, Artificial Sequence
  Description of Artificial Sequence: Synthetic peptide
  Seed: SIGKVCRTLLAKSVF
SIIKVTRVLLRKSVF

SEQ ID NO: 267873 - protein, 15 aa, Artificial Sequence
  Description of Artificial Sequence: Synthetic peptide
  Seed: SIGKVCRTLLAKSVF
SIIKVTRVLLSKSVF

SEQ ID NO: 267874 - protein, 15 aa, Artificial Sequence
  Description of Artificial Sequence: Synthetic peptide
  Seed: SIGKVCRTLLAKSVF
SIIKVVRALLAKSVF

SEQ ID NO: 267875 - protein, 15 aa, Artificial Sequence
  Description of Artificial Sequence: Synthetic peptide
  Seed: SIGKVCRTLLAKSVF
SIIKVVRALLGKSVF

SEQ ID NO: 267876 - protein, 15 aa, Artificial Sequence
  Description of Artificial Sequence: Synthetic peptide
  Seed: SIGKVCRTLLAKSVF
SIIKVVRALLHKSVF

SEQ ID NO: 267877 - protein, 15 aa, Artificial Sequence
  Description of Artificial Sequence: Synthetic peptide
  Seed: SIGKVCRTLLAKSVF
SIIKVVRALLKKSVF

SEQ ID NO: 267878 - protein, 15 aa, Artificial Sequence
  Description of Artificial Sequence: Synthetic peptide
  Seed: SIGKVCRTLLAKSVF
SIIKVVRALLNKSVF

SEQ ID NO: 267879 - protein, 15 aa, Artificial Sequence
  Description of Artificial Sequence: Synthetic peptide
  Seed: SIGKVCRTLLAKSVF
SIIKVVRALLPKSVF

SEQ ID NO: 267880 - protein, 15 aa, Artificial Sequence
  Description of Artificial Sequence: Synthetic peptide
  Seed: SIGKVCRTLLAKSVF
SIIKVVRALLQKSVF

SEQ ID NO: 267881 - protein, 15 aa, Artificial Sequence
  Description of Artificial Sequence: Synthetic peptide
  Seed: SIGKVCRTLLAKSVF
SIIKVVRALLRKSVF

SEQ ID NO: 267882 - protein, 15 aa, Artificial Sequence
  Description of Artificial Sequence: Synthetic peptide
  Seed: SIGKVCRTLLAKSVF
SIIKVVRALLSKSVF

SEQ ID NO: 267883 - protein, 15 aa, Artificial Sequence
  Description of Artificial Sequence: Synthetic peptide
  Seed: SIGKVCRTLLAKSVF
SIIKVVRALLTKSVF

SEQ ID NO: 267884 - protein, 15 aa, Artificial Sequence
  Description of Artificial Sequence: Synthetic peptide
  Seed: SIGKVCRTLLAKSVF
SIIKVVRALLYKSVF

SEQ ID NO: 267885 - protein, 15 aa, Artificial Sequence
  Description of Artificial Sequence: Synthetic peptide
  Seed: SIGKVCRTLLAKSVF
SIIKVVRDLLAKSVF

SEQ ID NO: 267886 - protein, 15 aa, Artificial Sequence
  Description of Artificial Sequence: Synthetic peptide
  Seed: SIGKVCRTLLAKSVF
SIIKVVRDLLSKSVF

SEQ ID NO: 267887 - protein, 15 aa, Artificial Sequence
  Description of Artificial Sequence: Synthetic peptide
  Seed: SIGKVCRTLLAKSVF
SIIKVVRELLKKSVF

SEQ ID NO: 267888 - protein, 15 aa, Artificial Sequence
  Description of Artificial Sequence: Synthetic peptide
  Seed: SIGKVCRTLLAKSVF
SIIKVVRELLRKSVF

SEQ ID NO: 267889 - protein, 15 aa, Artificial Sequence
  Description of Artificial Sequence: Synthetic peptide
  Seed: SIGKVCRTLLAKSVF
SIIKVVRGLLAKSVF

SEQ ID NO: 267890 - protein, 15 aa, Artificial Sequence
  Description of Artificial Sequence: Synthetic peptide
  Seed: SIGKVCRTLLAKSVF
SIIKVVRGLLGKSVF

SEQ ID NO: 267891 - protein, 15 aa, Artificial Sequence
  Description of Artificial Sequence: Synthetic peptide
  Seed: SIGKVCRTLLAKSVF
SIIKVVRGLLHKSVF

SEQ ID NO: 267892 - protein, 15 aa, Artificial Sequence
  Description of Artificial Sequence: Synthetic peptide
  Seed: SIGKVCRTLLAKSVF
SIIKVVRGLLNKSVF

SEQ ID NO: 267893 - protein, 15 aa, Artificial Sequence
  Description of Artificial Sequence: Synthetic peptide
  Seed: SIGKVCRTLLAKSVF
SIIKVVRGLLQKSVF

SEQ ID NO: 267894 - protein, 15 aa, Artificial Sequence
  Description of Artificial Sequence: Synthetic peptide
  Seed: SIGKVCRTLLAKSVF
SIIKVVRGLLRKSVF

SEQ ID NO: 267895 - protein, 15 aa, Artificial Sequence
  Description of Artificial Sequence: Synthetic peptide
  Seed: SIGKVCRTLLAKSVF
SIIKVVRGLLSKSVF

SEQ ID NO: 267896 - protein, 15 aa, Artificial Sequence
  Description of Artificial Sequence: Synthetic peptide
  Seed: SIGKVCRTLLAKSVF
SIIKVVRGLLTKSVF

SEQ ID NO: 267897 - protein, 15 aa, Artificial Sequence
  Description of Artificial Sequence: Synthetic peptide
  Seed: SIGKVCRTLLAKSVF
SIIKVVRGLLYKSVF

SEQ ID NO: 267898 - protein, 15 aa, Artificial Sequence
  Description of Artificial Sequence: Synthetic peptide
  Seed: SIGKVCRTLLAKSVF
SIIKVVRHLLAKSVF

SEQ ID NO: 267899 - protein, 15 aa, Artificial Sequence
  Description of Artificial Sequence: Synthetic peptide
  Seed: SIGKVCRTLLAKSVF
SIIKVVRHLLEKSVF

SEQ ID NO: 267900 - protein, 15 aa, Artificial Sequence
  Description of Artificial Sequence: Synthetic peptide
  Seed: SIGKVCRTLLAKSVF
SIIKVVRHLLGKSVF

SEQ ID NO: 267901 - protein, 15 aa, Artificial Sequence
  Description of Artificial Sequence: Synthetic peptide
  Seed: SIGKVCRTLLAKSVF
SIIKVVRHLLHKSVF

SEQ ID NO: 267902 - protein, 15 aa, Artificial Sequence
  Description of Artificial Sequence: Synthetic peptide
  Seed: SIGKVCRTLLAKSVF
SIIKVVRHLLIKSVF

SEQ ID NO: 267903 - protein, 15 aa, Artificial Sequence
  Description of Artificial Sequence: Synthetic peptide
  Seed: SIGKVCRTLLAKSVF
SIIKVVRHLLKKSVF

SEQ ID NO: 267904 - protein, 15 aa, Artificial Sequence
  Description of Artificial Sequence: Synthetic peptide
  Seed: SIGKVCRTLLAKSVF
SIIKVVRHLLMKSVF

SEQ ID NO: 267905 - protein, 15 aa, Artificial Sequence
  Description of Artificial Sequence: Synthetic peptide
  Seed: SIGKVCRTLLAKSVF
SIIKVVRHLLNKSVF

SEQ ID NO: 267906 - protein, 15 aa, Artificial Sequence
  Description of Artificial Sequence: Synthetic peptide
  Seed: SIGKVCRTLLAKSVF
SIIKVVRHLLPKSVF

SEQ ID NO: 267907 - protein, 15 aa, Artificial Sequence
  Description of Artificial Sequence: Synthetic peptide
  Seed: SIGKVCRTLLAKSVF
SIIKVVRHLLQKSVF

SEQ ID NO: 267908 - protein, 15 aa, Artificial Sequence
  Description of Artificial Sequence: Synthetic peptide
  Seed: SIGKVCRTLLAKSVF
SIIKVVRHLLRKSVF

SEQ ID NO: 267909 - protein, 15 aa, Artificial Sequence
  Description of Artificial Sequence: Synthetic peptide
  Seed: SIGKVCRTLLAKSVF
SIIKVVRHLLSKSVF

SEQ ID NO: 267910 - protein, 15 aa, Artificial Sequence
  Description of Artificial Sequence: Synthetic peptide
  Seed: SIGKVCRTLLAKSVF
SIIKVVRHLLTKSVF

SEQ ID NO: 267911 - protein, 15 aa, Artificial Sequence
  Description of Artificial Sequence: Synthetic peptide
  Seed: SIGKVCRTLLAKSVF
SIIKVVRHLLVKSVF

SEQ ID NO: 267912 - protein, 15 aa, Artificial Sequence
  Description of Artificial Sequence: Synthetic peptide
  Seed: SIGKVCRTLLAKSVF
SIIKVVRHLLYKSVF

SEQ ID NO: 267913 - protein, 15 aa, Artificial Sequence
  Description of Artificial Sequence: Synthetic peptide
  Seed: SIGKVCRTLLAKSVF
SIIKVVRILLHKSVF

SEQ ID NO: 267914 - protein, 15 aa, Artificial Sequence
  Description of Artificial Sequence: Synthetic peptide
  Seed: SIGKVCRTLLAKSVF
SIIKVVRKLLAKSVF

SEQ ID NO: 267915 - protein, 15 aa, Artificial Sequence
  Description of Artificial Sequence: Synthetic peptide
  Seed: SIGKVCRTLLAKSVF
SIIKVVRKLLCKSVF

SEQ ID NO: 267916 - protein, 15 aa, Artificial Sequence
  Description of Artificial Sequence: Synthetic peptide
  Seed: SIGKVCRTLLAKSVF
SIIKVVRKLLDKSVF

SEQ ID NO: 267917 - protein, 15 aa, Artificial Sequence
  Description of Artificial Sequence: Synthetic peptide
  Seed: SIGKVCRTLLAKSVF
SIIKVVRKLLEKSVF

SEQ ID NO: 267918 - protein, 15 aa, Artificial Sequence
  Description of Artificial Sequence: Synthetic peptide
  Seed: SIGKVCRTLLAKSVF
SIIKVVRKLLFKSVF

SEQ ID NO: 267919 - protein, 15 aa, Artificial Sequence
  Description of Artificial Sequence: Synthetic peptide
  Seed: SIGKVCRTLLAKSVF
SIIKVVRKLLGKSVF

SEQ ID NO: 267920 - protein, 15 aa, Artificial Sequence
  Description of Artificial Sequence: Synthetic peptide
  Seed: SIGKVCRTLLAKSVF
SIIKVVRKLLHKSVF

SEQ ID NO: 267921 - protein, 15 aa, Artificial Sequence
  Description of Artificial Sequence: Synthetic peptide
  Seed: SIGKVCRTLLAKSVF
SIIKVVRKLLIKSVF

SEQ ID NO: 267922 - protein, 15 aa, Artificial Sequence
  Description of Artificial Sequence: Synthetic peptide
  Seed: SIGKVCRTLLAKSVF
SIIKVVRKLLKKSVF

SEQ ID NO: 267923 - protein, 15 aa, Artificial Sequence
  Description of Artificial Sequence: Synthetic peptide
  Seed: SIGKVCRTLLAKSVF
SIIKVVRKLLLKSVF

SEQ ID NO: 267924 - protein, 15 aa, Artificial Sequence
  Description of Artificial Sequence: Synthetic peptide
  Seed: SIGKVCRTLLAKSVF
SIIKVVRKLLMKSVF

SEQ ID NO: 267925 - protein, 15 aa, Artificial Sequence
  Description of Artificial Sequence: Synthetic peptide
  Seed: SIGKVCRTLLAKSVF
SIIKVVRKLLNKSVF

SEQ ID NO: 267926 - protein, 15 aa, Artificial Sequence
  Description of Artificial Sequence: Synthetic peptide
  Seed: SIGKVCRTLLAKSVF
SIIKVVRKLLPKSVF

SEQ ID NO: 267927 - protein, 15 aa, Artificial Sequence
  Description of Artificial Sequence: Synthetic peptide
  Seed: SIGKVCRTLLAKSVF
SIIKVVRKLLQKSVF

SEQ ID NO: 267928 - protein, 15 aa, Artificial Sequence
  Description of Artificial Sequence: Synthetic peptide
  Seed: SIGKVCRTLLAKSVF
SIIKVVRKLLRKSVF

SEQ ID NO: 267929 - protein, 15 aa, Artificial Sequence
  Description of Artificial Sequence: Synthetic peptide
  Seed: SIGKVCRTLLAKSVF
SIIKVVRKLLSKSVF

SEQ ID NO: 267930 - protein, 15 aa, Artificial Sequence
  Description of Artificial Sequence: Synthetic peptide
  Seed: SIGKVCRTLLAKSVF
SIIKVVRKLLTKSVF

SEQ ID NO: 267931 - protein, 15 aa, Artificial Sequence
  Description of Artificial Sequence: Synthetic peptide
  Seed: SIGKVCRTLLAKSVF
SIIKVVRKLLVKSVF

SEQ ID NO: 267932 - protein, 15 aa, Artificial Sequence
  Description of Artificial Sequence: Synthetic peptide
  Seed: SIGKVCRTLLAKSVF
SIIKVVRKLLWKSVF

SEQ ID NO: 267933 - protein, 15 aa, Artificial Sequence
  Description of Artificial Sequence: Synthetic peptide
  Seed: SIGKVCRTLLAKSVF
SIIKVVRKLLYKSVF

SEQ ID NO: 267934 - protein, 15 aa, Artificial Sequence
  Description of Artificial Sequence: Synthetic peptide
  Seed: SIGKVCRTLLAKSVF
SIIKVVRLLLHKSVF

SEQ ID NO: 267935 - protein, 15 aa, Artificial Sequence
  Description of Artificial Sequence: Synthetic peptide
  Seed: SIGKVCRTLLAKSVF
SIIKVVRNLLAKSVF

SEQ ID NO: 267936 - protein, 15 aa, Artificial Sequence
  Description of Artificial Sequence: Synthetic peptide
  Seed: SIGKVCRTLLAKSVF
SIIKVVRNLLDKSVF

SEQ ID NO: 267937 - protein, 15 aa, Artificial Sequence
  Description of Artificial Sequence: Synthetic peptide
  Seed: SIGKVCRTLLAKSVF
SIIKVVRNLLEKSVF

SEQ ID NO: 267938 - protein, 15 aa, Artificial Sequence
  Description of Artificial Sequence: Synthetic peptide
  Seed: SIGKVCRTLLAKSVF
SIIKVVRNLLGKSVF

SEQ ID NO: 267939 - protein, 15 aa, Artificial Sequence
  Description of Artificial Sequence: Synthetic peptide
  Seed: SIGKVCRTLLAKSVF
SIIKVVRNLLHKSVF

SEQ ID NO: 267940 - protein, 15 aa, Artificial Sequence
  Description of Artificial Sequence: Synthetic peptide
  Seed: SIGKVCRTLLAKSVF
SIIKVVRNLLKKSVF

SEQ ID NO: 267941 - protein, 15 aa, Artificial Sequence
  Description of Artificial Sequence: Synthetic peptide
  Seed: SIGKVCRTLLAKSVF
SIIKVVRNLLMKSVF

SEQ ID NO: 267942 - protein, 15 aa, Artificial Sequence
  Description of Artificial Sequence: Synthetic peptide
  Seed: SIGKVCRTLLAKSVF
SIIKVVRNLLNKSVF

SEQ ID NO: 267943 - protein, 15 aa, Artificial Sequence
  Description of Artificial Sequence: Synthetic peptide
  Seed: SIGKVCRTLLAKSVF
SIIKVVRNLLPKSVF

SEQ ID NO: 267944 - protein, 15 aa, Artificial Sequence
  Description of Artificial Sequence: Synthetic peptide
  Seed: SIGKVCRTLLAKSVF
SIIKVVRNLLQKSVF

SEQ ID NO: 267945 - protein, 15 aa, Artificial Sequence
  Description of Artificial Sequence: Synthetic peptide
  Seed: SIGKVCRTLLAKSVF
SIIKVVRNLLRKSVF

SEQ ID NO: 267946 - protein, 15 aa, Artificial Sequence
  Description of Artificial Sequence: Synthetic peptide
  Seed: SIGKVCRTLLAKSVF
SIIKVVRNLLSKSVF

SEQ ID NO: 267947 - protein, 15 aa, Artificial Sequence
  Description of Artificial Sequence: Synthetic peptide
  Seed: SIGKVCRTLLAKSVF
SIIKVVRNLLTKSVF

SEQ ID NO: 267948 - protein, 15 aa, Artificial Sequence
  Description of Artificial Sequence: Synthetic peptide
  Seed: SIGKVCRTLLAKSVF
SIIKVVRNLLVKSVF

SEQ ID NO: 267949 - protein, 15 aa, Artificial Sequence
  Description of Artificial Sequence: Synthetic peptide
  Seed: SIGKVCRTLLAKSVF
SIIKVVRNLLYKSVF

SEQ ID NO: 267950 - protein, 15 aa, Artificial Sequence
  Description of Artificial Sequence: Synthetic peptide
  Seed: SIGKVCRTLLAKSVF
SIIKVVRPLLAKSVF

SEQ ID NO: 267951 - protein, 15 aa, Artificial Sequence
  Description of Artificial Sequence: Synthetic peptide
  Seed: SIGKVCRTLLAKSVF
SIIKVVRPLLGKSVF

SEQ ID NO: 267952 - protein, 15 aa, Artificial Sequence
  Description of Artificial Sequence: Synthetic peptide
  Seed: SIGKVCRTLLAKSVF
SIIKVVRPLLHKSVF

SEQ ID NO: 267953 - protein, 15 aa, Artificial Sequence
  Description of Artificial Sequence: Synthetic peptide
  Seed: SIGKVCRTLLAKSVF
SIIKVVRPLLIKSVF

SEQ ID NO: 267954 - protein, 15 aa, Artificial Sequence
  Description of Artificial Sequence: Synthetic peptide
  Seed: SIGKVCRTLLAKSVF
SIIKVVRPLLLKSVF

SEQ ID NO: 267955 - protein, 15 aa, Artificial Sequence
  Description of Artificial Sequence: Synthetic peptide
  Seed: SIGKVCRTLLAKSVF
SIIKVVRPLLMKSVF

SEQ ID NO: 267956 - protein, 15 aa, Artificial Sequence
  Description of Artificial Sequence: Synthetic peptide
  Seed: SIGKVCRTLLAKSVF
SIIKVVRPLLNKSVF

SEQ ID NO: 267957 - protein, 15 aa, Artificial Sequence
  Description of Artificial Sequence: Synthetic peptide
  Seed: SIGKVCRTLLAKSVF
SIIKVVRPLLQKSVF

SEQ ID NO: 267958 - protein, 15 aa, Artificial Sequence
  Description of Artificial Sequence: Synthetic peptide
  Seed: SIGKVCRTLLAKSVF
SIIKVVRPLLRKSVF

SEQ ID NO: 267959 - protein, 15 aa, Artificial Sequence
  Description of Artificial Sequence: Synthetic peptide
  Seed: SIGKVCRTLLAKSVF
SIIKVVRPLLSKSVF

SEQ ID NO: 267960 - protein, 15 aa, Artificial Sequence
  Description of Artificial Sequence: Synthetic peptide
  Seed: SIGKVCRTLLAKSVF
SIIKVVRPLLTKSVF

SEQ ID NO: 267961 - protein, 15 aa, Artificial Sequence
  Description of Artificial Sequence: Synthetic peptide
  Seed: SIGKVCRTLLAKSVF
SIIKVVRPLLVKSVF

SEQ ID NO: 267962 - protein, 15 aa, Artificial Sequence
  Description of Artificial Sequence: Synthetic peptide
  Seed: SIGKVCRTLLAKSVF
SIIKVVRPLLYKSVF

SEQ ID NO: 267963 - protein, 15 aa, Artificial Sequence
  Description of Artificial Sequence: Synthetic peptide
  Seed: SIGKVCRTLLAKSVF
SIIKVVRQLLAKSVF

SEQ ID NO: 267964 - protein, 15 aa, Artificial Sequence
  Description of Artificial Sequence: Synthetic peptide
  Seed: SIGKVCRTLLAKSVF
SIIKVVRQLLGKSVF

SEQ ID NO: 267965 - protein, 15 aa, Artificial Sequence
  Description of Artificial Sequence: Synthetic peptide
  Seed: SIGKVCRTLLAKSVF
SIIKVVRQLLHKSVF

SEQ ID NO: 267966 - protein, 15 aa, Artificial Sequence
  Description of Artificial Sequence: Synthetic peptide
  Seed: SIGKVCRTLLAKSVF
SIIKVVRQLLKKSVF

SEQ ID NO: 267967 - protein, 15 aa, Artificial Sequence
  Description of Artificial Sequence: Synthetic peptide
  Seed: SIGKVCRTLLAKSVF
SIIKVVRQLLNKSVF

SEQ ID NO: 267968 - protein, 15 aa, Artificial Sequence
  Description of Artificial Sequence: Synthetic peptide
  Seed: SIGKVCRTLLAKSVF
SIIKVVRQLLQKSVF

SEQ ID NO: 267969 - protein, 15 aa, Artificial Sequence
  Description of Artificial Sequence: Synthetic peptide
  Seed: SIGKVCRTLLAKSVF
SIIKVVRQLLRKSVF

SEQ ID NO: 267970 - protein, 15 aa, Artificial Sequence
  Description of Artificial Sequence: Synthetic peptide
  Seed: SIGKVCRTLLAKSVF
SIIKVVRQLLSKSVF

SEQ ID NO: 267971 - protein, 15 aa, Artificial Sequence
  Description of Artificial Sequence: Synthetic peptide
  Seed: SIGKVCRTLLAKSVF
SIIKVVRQLLTKSVF

SEQ ID NO: 267972 - protein, 15 aa, Artificial Sequence
  Description of Artificial Sequence: Synthetic peptide
  Seed: SIGKVCRTLLAKSVF
SIIKVVRRLLAKSVF

SEQ ID NO: 267973 - protein, 15 aa, Artificial Sequence
  Description of Artificial Sequence: Synthetic peptide
  Seed: SIGKVCRTLLAKSVF
SIIKVVRRLLCKSVF

SEQ ID NO: 267974 - protein, 15 aa, Artificial Sequence
  Description of Artificial Sequence: Synthetic peptide
  Seed: SIGKVCRTLLAKSVF
SIIKVVRRLLDKSVF

SEQ ID NO: 267975 - protein, 15 aa, Artificial Sequence
  Description of Artificial Sequence: Synthetic peptide
  Seed: SIGKVCRTLLAKSVF
SIIKVVRRLLEKSVF

SEQ ID NO: 267976 - protein, 15 aa, Artificial Sequence
  Description of Artificial Sequence: Synthetic peptide
  Seed: SIGKVCRTLLAKSVF
SIIKVVRRLLFKSVF

SEQ ID NO: 267977 - protein, 15 aa, Artificial Sequence
  Description of Artificial Sequence: Synthetic peptide
  Seed: SIGKVCRTLLAKSVF
SIIKVVRRLLGKSVF

SEQ ID NO: 267978 - protein, 15 aa, Artificial Sequence
  Description of Artificial Sequence: Synthetic peptide
  Seed: SIGKVCRTLLAKSVF
SIIKVVRRLLHKSVF

SEQ ID NO: 267979 - protein, 15 aa, Artificial Sequence
  Description of Artificial Sequence: Synthetic peptide
  Seed: SIGKVCRTLLAKSVF
SIIKVVRRLLIKSVF

SEQ ID NO: 267980 - protein, 15 aa, Artificial Sequence
  Description of Artificial Sequence: Synthetic peptide
  Seed: SIGKVCRTLLAKSVF
SIIKVVRRLLKKSVF

SEQ ID NO: 267981 - protein, 15 aa, Artificial Sequence
  Description of Artificial Sequence: Synthetic peptide
  Seed: SIGKVCRTLLAKSVF
SIIKVVRRLLLKSVF

SEQ ID NO: 267982 - protein, 15 aa, Artificial Sequence
  Description of Artificial Sequence: Synthetic peptide
  Seed: SIGKVCRTLLAKSVF
SIIKVVRRLLMKSVF

SEQ ID NO: 267983 - protein, 15 aa, Artificial Sequence
  Description of Artificial Sequence: Synthetic peptide
  Seed: SIGKVCRTLLAKSVF
SIIKVVRRLLNKSVF

SEQ ID NO: 267984 - protein, 15 aa, Artificial Sequence
  Description of Artificial Sequence: Synthetic peptide
  Seed: SIGKVCRTLLAKSVF
SIIKVVRRLLPKSVF

SEQ ID NO: 267985 - protein, 15 aa, Artificial Sequence
  Description of Artificial Sequence: Synthetic peptide
  Seed: SIGKVCRTLLAKSVF
SIIKVVRRLLQKSVF

SEQ ID NO: 267986 - protein, 15 aa, Artificial Sequence
  Description of Artificial Sequence: Synthetic peptide
  Seed: SIGKVCRTLLAKSVF
SIIKVVRRLLRKSVF

SEQ ID NO: 267987 - protein, 15 aa, Artificial Sequence
  Description of Artificial Sequence: Synthetic peptide
  Seed: SIGKVCRTLLAKSVF
SIIKVVRRLLSKSVF

SEQ ID NO: 267988 - protein, 15 aa, Artificial Sequence
  Description of Artificial Sequence: Synthetic peptide
  Seed: SIGKVCRTLLAKSVF
SIIKVVRRLLTKSVF

SEQ ID NO: 267989 - protein, 15 aa, Artificial Sequence
  Description of Artificial Sequence: Synthetic peptide
  Seed: SIGKVCRTLLAKSVF
SIIKVVRRLLVKSVF

SEQ ID NO: 267990 - protein, 15 aa, Artificial Sequence
  Description of Artificial Sequence: Synthetic peptide
  Seed: SIGKVCRTLLAKSVF
SIIKVVRRLLWKSVF

SEQ ID NO: 267991 - protein, 15 aa, Artificial Sequence
  Description of Artificial Sequence: Synthetic peptide
  Seed: SIGKVCRTLLAKSVF
SIIKVVRRLLYKSVF

SEQ ID NO: 267992 - protein, 15 aa, Artificial Sequence
  Description of Artificial Sequence: Synthetic peptide
  Seed: SIGKVCRTLLAKSVF
SIIKVVRSLLAKSVF

SEQ ID NO: 267993 - protein, 15 aa, Artificial Sequence
  Description of Artificial Sequence: Synthetic peptide
  Seed: SIGKVCRTLLAKSVF
SIIKVVRSLLDKSVF

SEQ ID NO: 267994 - protein, 15 aa, Artificial Sequence
  Description of Artificial Sequence: Synthetic peptide
  Seed: SIGKVCRTLLAKSVF
SIIKVVRSLLEKSVF

SEQ ID NO: 267995 - protein, 15 aa, Artificial Sequence
  Description of Artificial Sequence: Synthetic peptide
  Seed: SIGKVCRTLLAKSVF
SIIKVVRSLLGKSVF

SEQ ID NO: 267996 - protein, 15 aa, Artificial Sequence
  Description of Artificial Sequence: Synthetic peptide
  Seed: SIGKVCRTLLAKSVF
SIIKVVRSLLHKSVF

SEQ ID NO: 267997 - protein, 15 aa, Artificial Sequence
  Description of Artificial Sequence: Synthetic peptide
  Seed: SIGKVCRTLLAKSVF
SIIKVVRSLLKKSVF

SEQ ID NO: 267998 - protein, 15 aa, Artificial Sequence
  Description of Artificial Sequence: Synthetic peptide
  Seed: SIGKVCRTLLAKSVF
SIIKVVRSLLNKSVF

SEQ ID NO: 267999 - protein, 15 aa, Artificial Sequence
  Description of Artificial Sequence: Synthetic peptide
  Seed: SIGKVCRTLLAKSVF
SIIKVVRSLLPKSVF

SEQ ID NO: 268000 - protein, 15 aa, Artificial Sequence
  Description of Artificial Sequence: Synthetic peptide
  Seed: SIGKVCRTLLAKSVF
SIIKVVRSLLQKSVF

SEQ ID NO: 268001 - protein, 15 aa, Artificial Sequence
  Description of Artificial Sequence: Synthetic peptide
  Seed: SIGKVCRTLLAKSVF
SIIKVVRSLLRKSVF

SEQ ID NO: 268002 - protein, 15 aa, Artificial Sequence
  Description of Artificial Sequence: Synthetic peptide
  Seed: SIGKVCRTLLAKSVF
SIIKVVRSLLSKSVF

SEQ ID NO: 268003 - protein, 15 aa, Artificial Sequence
  Description of Artificial Sequence: Synthetic peptide
  Seed: SIGKVCRTLLAKSVF
SIIKVVRSLLTKSVF

SEQ ID NO: 268004 - protein, 15 aa, Artificial Sequence
  Description of Artificial Sequence: Synthetic peptide
  Seed: SIGKVCRTLLAKSVF
SIIKVVRSLLVKSVF

SEQ ID NO: 268005 - protein, 15 aa, Artificial Sequence
  Description of Artificial Sequence: Synthetic peptide
  Seed: SIGKVCRTLLAKSVF
SIIKVVRSLLYKSVF

SEQ ID NO: 268006 - protein, 15 aa, Artificial Sequence
  Description of Artificial Sequence: Synthetic peptide
  Seed: SIGKVCRTLLAKSVF
SIIKVVRTLLAKSVF

SEQ ID NO: 268007 - protein, 15 aa, Artificial Sequence
  Description of Artificial Sequence: Synthetic peptide
  Seed: SIGKVCRTLLAKSVF
SIIKVVRTLLDKSVF

SEQ ID NO: 268008 - protein, 15 aa, Artificial Sequence
  Description of Artificial Sequence: Synthetic peptide
  Seed: SIGKVCRTLLAKSVF
SIIKVVRTLLEKSVF

SEQ ID NO: 268009 - protein, 15 aa, Artificial Sequence
  Description of Artificial Sequence: Synthetic peptide
  Seed: SIGKVCRTLLAKSVF
SIIKVVRTLLGKSVF

SEQ ID NO: 268010 - protein, 15 aa, Artificial Sequence
  Description of Artificial Sequence: Synthetic peptide
  Seed: SIGKVCRTLLAKSVF
SIIKVVRTLLHKSVF

SEQ ID NO: 268011 - protein, 15 aa, Artificial Sequence
  Description of Artificial Sequence: Synthetic peptide
  Seed: SIGKVCRTLLAKSVF
SIIKVVRTLLKKSVF

SEQ ID NO: 268012 - protein, 15 aa, Artificial Sequence
  Description of Artificial Sequence: Synthetic peptide
  Seed: SIGKVCRTLLAKSVF
SIIKVVRTLLMKSVF

SEQ ID NO: 268013 - protein, 15 aa, Artificial Sequence
  Description of Artificial Sequence: Synthetic peptide
  Seed: SIGKVCRTLLAKSVF
SIIKVVRTLLNKSVF

SEQ ID NO: 268014 - protein, 15 aa, Artificial Sequence
  Description of Artificial Sequence: Synthetic peptide
  Seed: SIGKVCRTLLAKSVF
SIIKVVRTLLPKSVF

SEQ ID NO: 268015 - protein, 15 aa, Artificial Sequence
  Description of Artificial Sequence: Synthetic peptide
  Seed: SIGKVCRTLLAKSVF
SIIKVVRTLLQKSVF

SEQ ID NO: 268016 - protein, 15 aa, Artificial Sequence
  Description of Artificial Sequence: Synthetic peptide
  Seed: SIGKVCRTLLAKSVF
SIIKVVRTLLRKSVF

SEQ ID NO: 268017 - protein, 15 aa, Artificial Sequence
  Description of Artificial Sequence: Synthetic peptide
  Seed: SIGKVCRTLLAKSVF
SIIKVVRTLLSKSVF

SEQ ID NO: 268018 - protein, 15 aa, Artificial Sequence
  Description of Artificial Sequence: Synthetic peptide
  Seed: SIGKVCRTLLAKSVF
SIIKVVRTLLTKSVF

SEQ ID NO: 268019 - protein, 15 aa, Artificial Sequence
  Description of Artificial Sequence: Synthetic peptide
  Seed: SIGKVCRTLLAKSVF
SIIKVVRTLLVKSVF

SEQ ID NO: 268020 - protein, 15 aa, Artificial Sequence
  Description of Artificial Sequence: Synthetic peptide
  Seed: SIGKVCRTLLAKSVF
SIIKVVRTLLYKSVF

SEQ ID NO: 268021 - protein, 15 aa, Artificial Sequence
  Description of Artificial Sequence: Synthetic peptide
  Seed: SIGKVCRTLLAKSVF
SIIKVVRVLLHKSVF

SEQ ID NO: 268022 - protein, 15 aa, Artificial Sequence
  Description of Artificial Sequence: Synthetic peptide
  Seed: SIGKVCRTLLAKSVF
SIIKVVRVLLRKSVF

SEQ ID NO: 268023 - protein, 15 aa, Artificial Sequence
  Description of Artificial Sequence: Synthetic peptide
  Seed: SIGKVCRTLLAKSVF
SIIKVVRVLLSKSVF

SEQ ID NO: 268024 - protein, 15 aa, Artificial Sequence
  Description of Artificial Sequence: Synthetic peptide
  Seed: SIGKVCRTLLAKSVF
SIIKVWRALLAKSVF

SEQ ID NO: 268025 - protein, 15 aa, Artificial Sequence
  Description of Artificial Sequence: Synthetic peptide
  Seed: SIGKVCRTLLAKSVF
SIIKVWRALLGKSVF

SEQ ID NO: 268026 - protein, 15 aa, Artificial Sequence
  Description of Artificial Sequence: Synthetic peptide
  Seed: SIGKVCRTLLAKSVF
SIIKVWRALLHKSVF

SEQ ID NO: 268027 - protein, 15 aa, Artificial Sequence
  Description of Artificial Sequence: Synthetic peptide
  Seed: SIGKVCRTLLAKSVF
SIIKVWRALLKKSVF

SEQ ID NO: 268028 - protein, 15 aa, Artificial Sequence
  Description of Artificial Sequence: Synthetic peptide
  Seed: SIGKVCRTLLAKSVF
SIIKVWRALLMKSVF

SEQ ID NO: 268029 - protein, 15 aa, Artificial Sequence
  Description of Artificial Sequence: Synthetic peptide
  Seed: SIGKVCRTLLAKSVF
SIIKVWRALLNKSVF

SEQ ID NO: 268030 - protein, 15 aa, Artificial Sequence
  Description of Artificial Sequence: Synthetic peptide
  Seed: SIGKVCRTLLAKSVF
SIIKVWRALLPKSVF

SEQ ID NO: 268031 - protein, 15 aa, Artificial Sequence
  Description of Artificial Sequence: Synthetic peptide
  Seed: SIGKVCRTLLAKSVF
SIIKVWRALLQKSVF

SEQ ID NO: 268032 - protein, 15 aa, Artificial Sequence
  Description of Artificial Sequence: Synthetic peptide
  Seed: SIGKVCRTLLAKSVF
SIIKVWRALLRKSVF

SEQ ID NO: 268033 - protein, 15 aa, Artificial Sequence
  Description of Artificial Sequence: Synthetic peptide
  Seed: SIGKVCRTLLAKSVF
SIIKVWRALLSKSVF

SEQ ID NO: 268034 - protein, 15 aa, Artificial Sequence
  Description of Artificial Sequence: Synthetic peptide
  Seed: SIGKVCRTLLAKSVF
SIIKVWRALLTKSVF

SEQ ID NO: 268035 - protein, 15 aa, Artificial Sequence
  Description of Artificial Sequence: Synthetic peptide
  Seed: SIGKVCRTLLAKSVF
SIIKVWRELLRKSVF

SEQ ID NO: 268036 - protein, 15 aa, Artificial Sequence
  Description of Artificial Sequence: Synthetic peptide
  Seed: SIGKVCRTLLAKSVF
SIIKVWRGLLAKSVF

SEQ ID NO: 268037 - protein, 15 aa, Artificial Sequence
  Description of Artificial Sequence: Synthetic peptide
  Seed: SIGKVCRTLLAKSVF
SIIKVWRGLLGKSVF

SEQ ID NO: 268038 - protein, 15 aa, Artificial Sequence
  Description of Artificial Sequence: Synthetic peptide
  Seed: SIGKVCRTLLAKSVF
SIIKVWRGLLHKSVF

SEQ ID NO: 268039 - protein, 15 aa, Artificial Sequence
  Description of Artificial Sequence: Synthetic peptide
  Seed: SIGKVCRTLLAKSVF
SIIKVWRGLLKKSVF

SEQ ID NO: 268040 - protein, 15 aa, Artificial Sequence
  Description of Artificial Sequence: Synthetic peptide
  Seed: SIGKVCRTLLAKSVF
SIIKVWRGLLQKSVF

SEQ ID NO: 268041 - protein, 15 aa, Artificial Sequence
  Description of Artificial Sequence: Synthetic peptide
  Seed: SIGKVCRTLLAKSVF
SIIKVWRGLLRKSVF

SEQ ID NO: 268042 - protein, 15 aa, Artificial Sequence
  Description of Artificial Sequence: Synthetic peptide
  Seed: SIGKVCRTLLAKSVF
SIIKVWRGLLSKSVF

SEQ ID NO: 268043 - protein, 15 aa, Artificial Sequence
  Description of Artificial Sequence: Synthetic peptide
  Seed: SIGKVCRTLLAKSVF
SIIKVWRGLLTKSVF

SEQ ID NO: 268044 - protein, 15 aa, Artificial Sequence
  Description of Artificial Sequence: Synthetic peptide
  Seed: SIGKVCRTLLAKSVF
SIIKVWRHLLAKSVF

SEQ ID NO: 268045 - protein, 15 aa, Artificial Sequence
  Description of Artificial Sequence: Synthetic peptide
  Seed: SIGKVCRTLLAKSVF
SIIKVWRHLLEKSVF

SEQ ID NO: 268046 - protein, 15 aa, Artificial Sequence
  Description of Artificial Sequence: Synthetic peptide
  Seed: SIGKVCRTLLAKSVF
SIIKVWRHLLGKSVF

SEQ ID NO: 268047 - protein, 15 aa, Artificial Sequence
  Description of Artificial Sequence: Synthetic peptide
  Seed: SIGKVCRTLLAKSVF
SIIKVWRHLLHKSVF

SEQ ID NO: 268048 - protein, 15 aa, Artificial Sequence
  Description of Artificial Sequence: Synthetic peptide
  Seed: SIGKVCRTLLAKSVF
SIIKVWRHLLIKSVF

SEQ ID NO: 268049 - protein, 15 aa, Artificial Sequence
  Description of Artificial Sequence: Synthetic peptide
  Seed: SIGKVCRTLLAKSVF
SIIKVWRHLLKKSVF

SEQ ID NO: 268050 - protein, 15 aa, Artificial Sequence
  Description of Artificial Sequence: Synthetic peptide
  Seed: SIGKVCRTLLAKSVF
SIIKVWRHLLLKSVF

SEQ ID NO: 268051 - protein, 15 aa, Artificial Sequence
  Description of Artificial Sequence: Synthetic peptide
  Seed: SIGKVCRTLLAKSVF
SIIKVWRHLLMKSVF

SEQ ID NO: 268052 - protein, 15 aa, Artificial Sequence
  Description of Artificial Sequence: Synthetic peptide
  Seed: SIGKVCRTLLAKSVF
SIIKVWRHLLNKSVF

SEQ ID NO: 268053 - protein, 15 aa, Artificial Sequence
  Description of Artificial Sequence: Synthetic peptide
  Seed: SIGKVCRTLLAKSVF
SIIKVWRHLLPKSVF

SEQ ID NO: 268054 - protein, 15 aa, Artificial Sequence
  Description of Artificial Sequence: Synthetic peptide
  Seed: SIGKVCRTLLAKSVF
SIIKVWRHLLQKSVF

SEQ ID NO: 268055 - protein, 15 aa, Artificial Sequence
  Description of Artificial Sequence: Synthetic peptide
  Seed: SIGKVCRTLLAKSVF
SIIKVWRHLLRKSVF

SEQ ID NO: 268056 - protein, 15 aa, Artificial Sequence
  Description of Artificial Sequence: Synthetic peptide
  Seed: SIGKVCRTLLAKSVF
SIIKVWRHLLSKSVF

SEQ ID NO: 268057 - protein, 15 aa, Artificial Sequence
  Description of Artificial Sequence: Synthetic peptide
  Seed: SIGKVCRTLLAKSVF
SIIKVWRHLLTKSVF

SEQ ID NO: 268058 - protein, 15 aa, Artificial Sequence
  Description of Artificial Sequence: Synthetic peptide
  Seed: SIGKVCRTLLAKSVF
SIIKVWRHLLVKSVF

SEQ ID NO: 268059 - protein, 15 aa, Artificial Sequence
  Description of Artificial Sequence: Synthetic peptide
  Seed: SIGKVCRTLLAKSVF
SIIKVWRHLLYKSVF

SEQ ID NO: 268060 - protein, 15 aa, Artificial Sequence
  Description of Artificial Sequence: Synthetic peptide
  Seed: SIGKVCRTLLAKSVF
SIIKVWRILLHKSVF

SEQ ID NO: 268061 - protein, 15 aa, Artificial Sequence
  Description of Artificial Sequence: Synthetic peptide
  Seed: SIGKVCRTLLAKSVF
SIIKVWRILLRKSVF

SEQ ID NO: 268062 - protein, 15 aa, Artificial Sequence
  Description of Artificial Sequence: Synthetic peptide
  Seed: SIGKVCRTLLAKSVF
SIIKVWRKLLAKSVF

SEQ ID NO: 268063 - protein, 15 aa, Artificial Sequence
  Description of Artificial Sequence: Synthetic peptide
  Seed: SIGKVCRTLLAKSVF
SIIKVWRKLLCKSVF

SEQ ID NO: 268064 - protein, 15 aa, Artificial Sequence
  Description of Artificial Sequence: Synthetic peptide
  Seed: SIGKVCRTLLAKSVF
SIIKVWRKLLDKSVF

SEQ ID NO: 268065 - protein, 15 aa, Artificial Sequence
  Description of Artificial Sequence: Synthetic peptide
  Seed: SIGKVCRTLLAKSVF
SIIKVWRKLLEKSVF

SEQ ID NO: 268066 - protein, 15 aa, Artificial Sequence
  Description of Artificial Sequence: Synthetic peptide
  Seed: SIGKVCRTLLAKSVF
SIIKVWRKLLFKSVF

SEQ ID NO: 268067 - protein, 15 aa, Artificial Sequence
  Description of Artificial Sequence: Synthetic peptide
  Seed: SIGKVCRTLLAKSVF
SIIKVWRKLLGKSVF

SEQ ID NO: 268068 - protein, 15 aa, Artificial Sequence
  Description of Artificial Sequence: Synthetic peptide
  Seed: SIGKVCRTLLAKSVF
SIIKVWRKLLHKSVF

SEQ ID NO: 268069 - protein, 15 aa, Artificial Sequence
  Description of Artificial Sequence: Synthetic peptide
  Seed: SIGKVCRTLLAKSVF
SIIKVWRKLLIKSVF

SEQ ID NO: 268070 - protein, 15 aa, Artificial Sequence
  Description of Artificial Sequence: Synthetic peptide
  Seed: SIGKVCRTLLAKSVF
SIIKVWRKLLKKSVF

SEQ ID NO: 268071 - protein, 15 aa, Artificial Sequence
  Description of Artificial Sequence: Synthetic peptide
  Seed: SIGKVCRTLLAKSVF
SIIKVWRKLLLKSVF

SEQ ID NO: 268072 - protein, 15 aa, Artificial Sequence
  Description of Artificial Sequence: Synthetic peptide
  Seed: SIGKVCRTLLAKSVF
SIIKVWRKLLMKSVF

SEQ ID NO: 268073 - protein, 15 aa, Artificial Sequence
  Description of Artificial Sequence: Synthetic peptide
  Seed: SIGKVCRTLLAKSVF
SIIKVWRKLLNKSVF

SEQ ID NO: 268074 - protein, 15 aa, Artificial Sequence
  Description of Artificial Sequence: Synthetic peptide
  Seed: SIGKVCRTLLAKSVF
SIIKVWRKLLPKSVF

SEQ ID NO: 268075 - protein, 15 aa, Artificial Sequence
  Description of Artificial Sequence: Synthetic peptide
  Seed: SIGKVCRTLLAKSVF
SIIKVWRKLLQKSVF

SEQ ID NO: 268076 - protein, 15 aa, Artificial Sequence
  Description of Artificial Sequence: Synthetic peptide
  Seed: SIGKVCRTLLAKSVF
SIIKVWRKLLRKSVF

SEQ ID NO: 268077 - protein, 15 aa, Artificial Sequence
  Description of Artificial Sequence: Synthetic peptide
  Seed: SIGKVCRTLLAKSVF
SIIKVWRKLLSKSVF

SEQ ID NO: 268078 - protein, 15 aa, Artificial Sequence
  Description of Artificial Sequence: Synthetic peptide
  Seed: SIGKVCRTLLAKSVF
SIIKVWRKLLTKSVF

SEQ ID NO: 268079 - protein, 15 aa, Artificial Sequence
  Description of Artificial Sequence: Synthetic peptide
  Seed: SIGKVCRTLLAKSVF
SIIKVWRKLLVKSVF

SEQ ID NO: 268080 - protein, 15 aa, Artificial Sequence
  Description of Artificial Sequence: Synthetic peptide
  Seed: SIGKVCRTLLAKSVF
SIIKVWRKLLWKSVF

SEQ ID NO: 268081 - protein, 15 aa, Artificial Sequence
  Description of Artificial Sequence: Synthetic peptide
  Seed: SIGKVCRTLLAKSVF
SIIKVWRKLLYKSVF

SEQ ID NO: 268082 - protein, 15 aa, Artificial Sequence
  Description of Artificial Sequence: Synthetic peptide
  Seed: SIGKVCRTLLAKSVF
SIIKVWRLLLHKSVF

SEQ ID NO: 268083 - protein, 15 aa, Artificial Sequence
  Description of Artificial Sequence: Synthetic peptide
  Seed: SIGKVCRTLLAKSVF
SIIKVWRLLLRKSVF

SEQ ID NO: 268084 - protein, 15 aa, Artificial Sequence
  Description of Artificial Sequence: Synthetic peptide
  Seed: SIGKVCRTLLAKSVF
SIIKVWRMLLHKSVF

SEQ ID NO: 268085 - protein, 15 aa, Artificial Sequence
  Description of Artificial Sequence: Synthetic peptide
  Seed: SIGKVCRTLLAKSVF
SIIKVWRNLLAKSVF

SEQ ID NO: 268086 - protein, 15 aa, Artificial Sequence
  Description of Artificial Sequence: Synthetic peptide
  Seed: SIGKVCRTLLAKSVF
SIIKVWRNLLGKSVF

SEQ ID NO: 268087 - protein, 15 aa, Artificial Sequence
  Description of Artificial Sequence: Synthetic peptide
  Seed: SIGKVCRTLLAKSVF
SIIKVWRNLLHKSVF

SEQ ID NO: 268088 - protein, 15 aa, Artificial Sequence
  Description of Artificial Sequence: Synthetic peptide
  Seed: SIGKVCRTLLAKSVF
SIIKVWRNLLKKSVF

SEQ ID NO: 268089 - protein, 15 aa, Artificial Sequence
  Description of Artificial Sequence: Synthetic peptide
  Seed: SIGKVCRTLLAKSVF
SIIKVWRNLLQKSVF

SEQ ID NO: 268090 - protein, 15 aa, Artificial Sequence
  Description of Artificial Sequence: Synthetic peptide
  Seed: SIGKVCRTLLAKSVF
SIIKVWRNLLRKSVF

SEQ ID NO: 268091 - protein, 15 aa, Artificial Sequence
  Description of Artificial Sequence: Synthetic peptide
  Seed: SIGKVCRTLLAKSVF
SIIKVWRNLLSKSVF

SEQ ID NO: 268092 - protein, 15 aa, Artificial Sequence
  Description of Artificial Sequence: Synthetic peptide
  Seed: SIGKVCRTLLAKSVF
SIIKVWRNLLTKSVF

SEQ ID NO: 268093 - protein, 15 aa, Artificial Sequence
  Description of Artificial Sequence: Synthetic peptide
  Seed: SIGKVCRTLLAKSVF
SIIKVWRNLLVKSVF

SEQ ID NO: 268094 - protein, 15 aa, Artificial Sequence
  Description of Artificial Sequence: Synthetic peptide
  Seed: SIGKVCRTLLAKSVF
SIIKVWRPLLAKSVF

SEQ ID NO: 268095 - protein, 15 aa, Artificial Sequence
  Description of Artificial Sequence: Synthetic peptide
  Seed: SIGKVCRTLLAKSVF
SIIKVWRPLLGKSVF

SEQ ID NO: 268096 - protein, 15 aa, Artificial Sequence
  Description of Artificial Sequence: Synthetic peptide
  Seed: SIGKVCRTLLAKSVF
SIIKVWRPLLHKSVF

SEQ ID NO: 268097 - protein, 15 aa, Artificial Sequence
  Description of Artificial Sequence: Synthetic peptide
  Seed: SIGKVCRTLLAKSVF
SIIKVWRPLLIKSVF

SEQ ID NO: 268098 - protein, 15 aa, Artificial Sequence
  Description of Artificial Sequence: Synthetic peptide
  Seed: SIGKVCRTLLAKSVF
SIIKVWRPLLKKSVF

SEQ ID NO: 268099 - protein, 15 aa, Artificial Sequence
  Description of Artificial Sequence: Synthetic peptide
  Seed: SIGKVCRTLLAKSVF
SIIKVWRPLLLKSVF

SEQ ID NO: 268100 - protein, 15 aa, Artificial Sequence
  Description of Artificial Sequence: Synthetic peptide
  Seed: SIGKVCRTLLAKSVF
SIIKVWRPLLMKSVF

SEQ ID NO: 268101 - protein, 15 aa, Artificial Sequence
  Description of Artificial Sequence: Synthetic peptide
  Seed: SIGKVCRTLLAKSVF
SIIKVWRPLLNKSVF

SEQ ID NO: 268102 - protein, 15 aa, Artificial Sequence
  Description of Artificial Sequence: Synthetic peptide
  Seed: SIGKVCRTLLAKSVF
SIIKVWRPLLQKSVF

SEQ ID NO: 268103 - protein, 15 aa, Artificial Sequence
  Description of Artificial Sequence: Synthetic peptide
  Seed: SIGKVCRTLLAKSVF
SIIKVWRPLLRKSVF

SEQ ID NO: 268104 - protein, 15 aa, Artificial Sequence
  Description of Artificial Sequence: Synthetic peptide
  Seed: SIGKVCRTLLAKSVF
SIIKVWRPLLSKSVF

SEQ ID NO: 268105 - protein, 15 aa, Artificial Sequence
  Description of Artificial Sequence: Synthetic peptide
  Seed: SIGKVCRTLLAKSVF
SIIKVWRPLLTKSVF

SEQ ID NO: 268106 - protein, 15 aa, Artificial Sequence
  Description of Artificial Sequence: Synthetic peptide
  Seed: SIGKVCRTLLAKSVF
SIIKVWRPLLVKSVF

SEQ ID NO: 268107 - protein, 15 aa, Artificial Sequence
  Description of Artificial Sequence: Synthetic peptide
  Seed: SIGKVCRTLLAKSVF
SIIKVWRPLLYKSVF

SEQ ID NO: 268108 - protein, 15 aa, Artificial Sequence
  Description of Artificial Sequence: Synthetic peptide
  Seed: SIGKVCRTLLAKSVF
SIIKVWRQLLAKSVF

SEQ ID NO: 268109 - protein, 15 aa, Artificial Sequence
  Description of Artificial Sequence: Synthetic peptide
  Seed: SIGKVCRTLLAKSVF
SIIKVWRQLLGKSVF

SEQ ID NO: 268110 - protein, 15 aa, Artificial Sequence
  Description of Artificial Sequence: Synthetic peptide
  Seed: SIGKVCRTLLAKSVF
SIIKVWRQLLHKSVF

SEQ ID NO: 268111 - protein, 15 aa, Artificial Sequence
  Description of Artificial Sequence: Synthetic peptide
  Seed: SIGKVCRTLLAKSVF
SIIKVWRQLLKKSVF

SEQ ID NO: 268112 - protein, 15 aa, Artificial Sequence
  Description of Artificial Sequence: Synthetic peptide
  Seed: SIGKVCRTLLAKSVF
SIIKVWRQLLRKSVF

SEQ ID NO: 268113 - protein, 15 aa, Artificial Sequence
  Description of Artificial Sequence: Synthetic peptide
  Seed: SIGKVCRTLLAKSVF
SIIKVWRQLLSKSVF

SEQ ID NO: 268114 - protein, 15 aa, Artificial Sequence
  Description of Artificial Sequence: Synthetic peptide
  Seed: SIGKVCRTLLAKSVF
SIIKVWRRLLAKSVF

SEQ ID NO: 268115 - protein, 15 aa, Artificial Sequence
  Description of Artificial Sequence: Synthetic peptide
  Seed: SIGKVCRTLLAKSVF
SIIKVWRRLLCKSVF

SEQ ID NO: 268116 - protein, 15 aa, Artificial Sequence
  Description of Artificial Sequence: Synthetic peptide
  Seed: SIGKVCRTLLAKSVF
SIIKVWRRLLDKSVF

SEQ ID NO: 268117 - protein, 15 aa, Artificial Sequence
  Description of Artificial Sequence: Synthetic peptide
  Seed: SIGKVCRTLLAKSVF
SIIKVWRRLLEKSVF

SEQ ID NO: 268118 - protein, 15 aa, Artificial Sequence
  Description of Artificial Sequence: Synthetic peptide
  Seed: SIGKVCRTLLAKSVF
SIIKVWRRLLFKSVF

SEQ ID NO: 268119 - protein, 15 aa, Artificial Sequence
  Description of Artificial Sequence: Synthetic peptide
  Seed: SIGKVCRTLLAKSVF
SIIKVWRRLLGKSVF

SEQ ID NO: 268120 - protein, 15 aa, Artificial Sequence
  Description of Artificial Sequence: Synthetic peptide
  Seed: SIGKVCRTLLAKSVF
SIIKVWRRLLHKSVF

SEQ ID NO: 268121 - protein, 15 aa, Artificial Sequence
  Description of Artificial Sequence: Synthetic peptide
  Seed: SIGKVCRTLLAKSVF
SIIKVWRRLLIKSVF

SEQ ID NO: 268122 - protein, 15 aa, Artificial Sequence
  Description of Artificial Sequence: Synthetic peptide
  Seed: SIGKVCRTLLAKSVF
SIIKVWRRLLKKSVF

SEQ ID NO: 268123 - protein, 15 aa, Artificial Sequence
  Description of Artificial Sequence: Synthetic peptide
  Seed: SIGKVCRTLLAKSVF
SIIKVWRRLLLKSVF

SEQ ID NO: 268124 - protein, 15 aa, Artificial Sequence
  Description of Artificial Sequence: Synthetic peptide
  Seed: SIGKVCRTLLAKSVF
SIIKVWRRLLMKSVF

SEQ ID NO: 268125 - protein, 15 aa, Artificial Sequence
  Description of Artificial Sequence: Synthetic peptide
  Seed: SIGKVCRTLLAKSVF
SIIKVWRRLLNKSVF

SEQ ID NO: 268126 - protein, 15 aa, Artificial Sequence
  Description of Artificial Sequence: Synthetic peptide
  Seed: SIGKVCRTLLAKSVF
SIIKVWRRLLPKSVF

SEQ ID NO: 268127 - protein, 15 aa, Artificial Sequence
  Description of Artificial Sequence: Synthetic peptide
  Seed: SIGKVCRTLLAKSVF
SIIKVWRRLLQKSVF

SEQ ID NO: 268128 - protein, 15 aa, Artificial Sequence
  Description of Artificial Sequence: Synthetic peptide
  Seed: SIGKVCRTLLAKSVF
SIIKVWRRLLRKSVF

SEQ ID NO: 268129 - protein, 15 aa, Artificial Sequence
  Description of Artificial Sequence: Synthetic peptide
  Seed: SIGKVCRTLLAKSVF
SIIKVWRRLLSKSVF

SEQ ID NO: 268130 - protein, 15 aa, Artificial Sequence
  Description of Artificial Sequence: Synthetic peptide
  Seed: SIGKVCRTLLAKSVF
SIIKVWRRLLTKSVF

SEQ ID NO: 268131 - protein, 15 aa, Artificial Sequence
  Description of Artificial Sequence: Synthetic peptide
  Seed: SIGKVCRTLLAKSVF
SIIKVWRRLLVKSVF

SEQ ID NO: 268132 - protein, 15 aa, Artificial Sequence
  Description of Artificial Sequence: Synthetic peptide
  Seed: SIGKVCRTLLAKSVF
SIIKVWRRLLWKSVF

SEQ ID NO: 268133 - protein, 15 aa, Artificial Sequence
  Description of Artificial Sequence: Synthetic peptide
  Seed: SIGKVCRTLLAKSVF
SIIKVWRRLLYKSVF

SEQ ID NO: 268134 - protein, 15 aa, Artificial Sequence
  Description of Artificial Sequence: Synthetic peptide
  Seed: SIGKVCRTLLAKSVF
SIIKVWRSLLAKSVF

SEQ ID NO: 268135 - protein, 15 aa, Artificial Sequence
  Description of Artificial Sequence: Synthetic peptide
  Seed: SIGKVCRTLLAKSVF
SIIKVWRSLLGKSVF

SEQ ID NO: 268136 - protein, 15 aa, Artificial Sequence
  Description of Artificial Sequence: Synthetic peptide
  Seed: SIGKVCRTLLAKSVF
SIIKVWRSLLHKSVF

SEQ ID NO: 268137 - protein, 15 aa, Artificial Sequence
  Description of Artificial Sequence: Synthetic peptide
  Seed: SIGKVCRTLLAKSVF
SIIKVWRSLLKKSVF

SEQ ID NO: 268138 - protein, 15 aa, Artificial Sequence
  Description of Artificial Sequence: Synthetic peptide
  Seed: SIGKVCRTLLAKSVF
SIIKVWRSLLNKSVF

SEQ ID NO: 268139 - protein, 15 aa, Artificial Sequence
  Description of Artificial Sequence: Synthetic peptide
  Seed: SIGKVCRTLLAKSVF
SIIKVWRSLLQKSVF

SEQ ID NO: 268140 - protein, 15 aa, Artificial Sequence
  Description of Artificial Sequence: Synthetic peptide
  Seed: SIGKVCRTLLAKSVF
SIIKVWRSLLRKSVF

SEQ ID NO: 268141 - protein, 15 aa, Artificial Sequence
  Description of Artificial Sequence: Synthetic peptide
  Seed: SIGKVCRTLLAKSVF
SIIKVWRSLLSKSVF

SEQ ID NO: 268142 - protein, 15 aa, Artificial Sequence
  Description of Artificial Sequence: Synthetic peptide
  Seed: SIGKVCRTLLAKSVF
SIIKVWRSLLTKSVF

SEQ ID NO: 268143 - protein, 15 aa, Artificial Sequence
  Description of Artificial Sequence: Synthetic peptide
  Seed: SIGKVCRTLLAKSVF
SIIKVWRSLLVKSVF

SEQ ID NO: 268144 - protein, 15 aa, Artificial Sequence
  Description of Artificial Sequence: Synthetic peptide
  Seed: SIGKVCRTLLAKSVF
SIIKVWRTLLAKSVF

SEQ ID NO: 268145 - protein, 15 aa, Artificial Sequence
  Description of Artificial Sequence: Synthetic peptide
  Seed: SIGKVCRTLLAKSVF
SIIKVWRTLLGKSVF

SEQ ID NO: 268146 - protein, 15 aa, Artificial Sequence
  Description of Artificial Sequence: Synthetic peptide
  Seed: SIGKVCRTLLAKSVF
SIIKVWRTLLHKSVF

SEQ ID NO: 268147 - protein, 15 aa, Artificial Sequence
  Description of Artificial Sequence: Synthetic peptide
  Seed: SIGKVCRTLLAKSVF
SIIKVWRTLLKKSVF

SEQ ID NO: 268148 - protein, 15 aa, Artificial Sequence
  Description of Artificial Sequence: Synthetic peptide
  Seed: SIGKVCRTLLAKSVF
SIIKVWRTLLMKSVF

SEQ ID NO: 268149 - protein, 15 aa, Artificial Sequence
  Description of Artificial Sequence: Synthetic peptide
  Seed: SIGKVCRTLLAKSVF
SIIKVWRTLLQKSVF

SEQ ID NO: 268150 - protein, 15 aa, Artificial Sequence
  Description of Artificial Sequence: Synthetic peptide
  Seed: SIGKVCRTLLAKSVF
SIIKVWRTLLRKSVF

SEQ ID NO: 268151 - protein, 15 aa, Artificial Sequence
  Description of Artificial Sequence: Synthetic peptide
  Seed: SIGKVCRTLLAKSVF
SIIKVWRTLLSKSVF

SEQ ID NO: 268152 - protein, 15 aa, Artificial Sequence
  Description of Artificial Sequence: Synthetic peptide
  Seed: SIGKVCRTLLAKSVF
SIIKVWRTLLTKSVF

SEQ ID NO: 268153 - protein, 15 aa, Artificial Sequence
  Description of Artificial Sequence: Synthetic peptide
  Seed: SIGKVCRTLLAKSVF
SIIKVWRVLLHKSVF

SEQ ID NO: 268154 - protein, 15 aa, Artificial Sequence
  Description of Artificial Sequence: Synthetic peptide
  Seed: SIGKVCRTLLAKSVF
SIIKVWRVLLKKSVF

SEQ ID NO: 268155 - protein, 15 aa, Artificial Sequence
  Description of Artificial Sequence: Synthetic peptide
  Seed: SIGKVCRTLLAKSVF
SIIKVWRVLLRKSVF

SEQ ID NO: 268156 - protein, 15 aa, Artificial Sequence
  Description of Artificial Sequence: Synthetic peptide
  Seed: SIGKVCRTLLAKSVF
SIIKVYRALLAKSVF

SEQ ID NO: 268157 - protein, 15 aa, Artificial Sequence
  Description of Artificial Sequence: Synthetic peptide
  Seed: SIGKVCRTLLAKSVF
SIIKVYRALLGKSVF

SEQ ID NO: 268158 - protein, 15 aa, Artificial Sequence
  Description of Artificial Sequence: Synthetic peptide
  Seed: SIGKVCRTLLAKSVF
SIIKVYRALLHKSVF

SEQ ID NO: 268159 - protein, 15 aa, Artificial Sequence
  Description of Artificial Sequence: Synthetic peptide
  Seed: SIGKVCRTLLAKSVF
SIIKVYRALLKKSVF

SEQ ID NO: 268160 - protein, 15 aa, Artificial Sequence
  Description of Artificial Sequence: Synthetic peptide
  Seed: SIGKVCRTLLAKSVF
SIIKVYRALLQKSVF

SEQ ID NO: 268161 - protein, 15 aa, Artificial Sequence
  Description of Artificial Sequence: Synthetic peptide
  Seed: SIGKVCRTLLAKSVF
SIIKVYRALLRKSVF

SEQ ID NO: 268162 - protein, 15 aa, Artificial Sequence
  Description of Artificial Sequence: Synthetic peptide
  Seed: SIGKVCRTLLAKSVF
SIIKVYRALLSKSVF

SEQ ID NO: 268163 - protein, 15 aa, Artificial Sequence
  Description of Artificial Sequence: Synthetic peptide
  Seed: SIGKVCRTLLAKSVF
SIIKVYRELLRKSVF

SEQ ID NO: 268164 - protein, 15 aa, Artificial Sequence
  Description of Artificial Sequence: Synthetic peptide
  Seed: SIGKVCRTLLAKSVF
SIIKVYRGLLAKSVF

SEQ ID NO: 268165 - protein, 15 aa, Artificial Sequence
  Description of Artificial Sequence: Synthetic peptide
  Seed: SIGKVCRTLLAKSVF
SIIKVYRGLLGKSVF

SEQ ID NO: 268166 - protein, 15 aa, Artificial Sequence
  Description of Artificial Sequence: Synthetic peptide
  Seed: SIGKVCRTLLAKSVF
SIIKVYRGLLHKSVF

SEQ ID NO: 268167 - protein, 15 aa, Artificial Sequence
  Description of Artificial Sequence: Synthetic peptide
  Seed: SIGKVCRTLLAKSVF
SIIKVYRGLLQKSVF

SEQ ID NO: 268168 - protein, 15 aa, Artificial Sequence
  Description of Artificial Sequence: Synthetic peptide
  Seed: SIGKVCRTLLAKSVF
SIIKVYRGLLRKSVF

SEQ ID NO: 268169 - protein, 15 aa, Artificial Sequence
  Description of Artificial Sequence: Synthetic peptide
  Seed: SIGKVCRTLLAKSVF
SIIKVYRGLLSKSVF

SEQ ID NO: 268170 - protein, 15 aa, Artificial Sequence
  Description of Artificial Sequence: Synthetic peptide
  Seed: SIGKVCRTLLAKSVF
SIIKVYRHLLAKSVF

SEQ ID NO: 268171 - protein, 15 aa, Artificial Sequence
  Description of Artificial Sequence: Synthetic peptide
  Seed: SIGKVCRTLLAKSVF
SIIKVYRHLLGKSVF

SEQ ID NO: 268172 - protein, 15 aa, Artificial Sequence
  Description of Artificial Sequence: Synthetic peptide
  Seed: SIGKVCRTLLAKSVF
SIIKVYRHLLHKSVF

SEQ ID NO: 268173 - protein, 15 aa, Artificial Sequence
  Description of Artificial Sequence: Synthetic peptide
  Seed: SIGKVCRTLLAKSVF
SIIKVYRHLLKKSVF

SEQ ID NO: 268174 - protein, 15 aa, Artificial Sequence
  Description of Artificial Sequence: Synthetic peptide
  Seed: SIGKVCRTLLAKSVF
SIIKVYRHLLMKSVF

SEQ ID NO: 268175 - protein, 15 aa, Artificial Sequence
  Description of Artificial Sequence: Synthetic peptide
  Seed: SIGKVCRTLLAKSVF
SIIKVYRHLLNKSVF

SEQ ID NO: 268176 - protein, 15 aa, Artificial Sequence
  Description of Artificial Sequence: Synthetic peptide
  Seed: SIGKVCRTLLAKSVF
SIIKVYRHLLQKSVF

SEQ ID NO: 268177 - protein, 15 aa, Artificial Sequence
  Description of Artificial Sequence: Synthetic peptide
  Seed: SIGKVCRTLLAKSVF
SIIKVYRHLLRKSVF

SEQ ID NO: 268178 - protein, 15 aa, Artificial Sequence
  Description of Artificial Sequence: Synthetic peptide
  Seed: SIGKVCRTLLAKSVF
SIIKVYRHLLSKSVF

SEQ ID NO: 268179 - protein, 15 aa, Artificial Sequence
  Description of Artificial Sequence: Synthetic peptide
  Seed: SIGKVCRTLLAKSVF
SIIKVYRHLLTKSVF

SEQ ID NO: 268180 - protein, 15 aa, Artificial Sequence
  Description of Artificial Sequence: Synthetic peptide
  Seed: SIGKVCRTLLAKSVF
SIIKVYRHLLVKSVF

SEQ ID NO: 268181 - protein, 15 aa, Artificial Sequence
  Description of Artificial Sequence: Synthetic peptide
  Seed: SIGKVCRTLLAKSVF
SIIKVYRHLLYKSVF

SEQ ID NO: 268182 - protein, 15 aa, Artificial Sequence
  Description of Artificial Sequence: Synthetic peptide
  Seed: SIGKVCRTLLAKSVF
SIIKVYRILLHKSVF

SEQ ID NO: 268183 - protein, 15 aa, Artificial Sequence
  Description of Artificial Sequence: Synthetic peptide
  Seed: SIGKVCRTLLAKSVF
SIIKVYRKLLAKSVF

SEQ ID NO: 268184 - protein, 15 aa, Artificial Sequence
  Description of Artificial Sequence: Synthetic peptide
  Seed: SIGKVCRTLLAKSVF
SIIKVYRKLLCKSVF

SEQ ID NO: 268185 - protein, 15 aa, Artificial Sequence
  Description of Artificial Sequence: Synthetic peptide
  Seed: SIGKVCRTLLAKSVF
SIIKVYRKLLDKSVF

SEQ ID NO: 268186 - protein, 15 aa, Artificial Sequence
  Description of Artificial Sequence: Synthetic peptide
  Seed: SIGKVCRTLLAKSVF
SIIKVYRKLLEKSVF

SEQ ID NO: 268187 - protein, 15 aa, Artificial Sequence
  Description of Artificial Sequence: Synthetic peptide
  Seed: SIGKVCRTLLAKSVF
SIIKVYRKLLFKSVF

SEQ ID NO: 268188 - protein, 15 aa, Artificial Sequence
  Description of Artificial Sequence: Synthetic peptide
  Seed: SIGKVCRTLLAKSVF
SIIKVYRKLLGKSVF

SEQ ID NO: 268189 - protein, 15 aa, Artificial Sequence
  Description of Artificial Sequence: Synthetic peptide
  Seed: SIGKVCRTLLAKSVF
SIIKVYRKLLHKSVF

SEQ ID NO: 268190 - protein, 15 aa, Artificial Sequence
  Description of Artificial Sequence: Synthetic peptide
  Seed: SIGKVCRTLLAKSVF
SIIKVYRKLLIKSVF

SEQ ID NO: 268191 - protein, 15 aa, Artificial Sequence
  Description of Artificial Sequence: Synthetic peptide
  Seed: SIGKVCRTLLAKSVF
SIIKVYRKLLKKSVF

SEQ ID NO: 268192 - protein, 15 aa, Artificial Sequence
  Description of Artificial Sequence: Synthetic peptide
  Seed: SIGKVCRTLLAKSVF
SIIKVYRKLLLKSVF

SEQ ID NO: 268193 - protein, 15 aa, Artificial Sequence
  Description of Artificial Sequence: Synthetic peptide
  Seed: SIGKVCRTLLAKSVF
SIIKVYRKLLMKSVF

SEQ ID NO: 268194 - protein, 15 aa, Artificial Sequence
  Description of Artificial Sequence: Synthetic peptide
  Seed: SIGKVCRTLLAKSVF
SIIKVYRKLLNKSVF

SEQ ID NO: 268195 - protein, 15 aa, Artificial Sequence
  Description of Artificial Sequence: Synthetic peptide
  Seed: SIGKVCRTLLAKSVF
SIIKVYRKLLPKSVF

SEQ ID NO: 268196 - protein, 15 aa, Artificial Sequence
  Description of Artificial Sequence: Synthetic peptide
  Seed: SIGKVCRTLLAKSVF
SIIKVYRKLLQKSVF

SEQ ID NO: 268197 - protein, 15 aa, Artificial Sequence
  Description of Artificial Sequence: Synthetic peptide
  Seed: SIGKVCRTLLAKSVF
SIIKVYRKLLRKSVF

SEQ ID NO: 268198 - protein, 15 aa, Artificial Sequence
  Description of Artificial Sequence: Synthetic peptide
  Seed: SIGKVCRTLLAKSVF
SIIKVYRKLLSKSVF

SEQ ID NO: 268199 - protein, 15 aa, Artificial Sequence
  Description of Artificial Sequence: Synthetic peptide
  Seed: SIGKVCRTLLAKSVF
SIIKVYRKLLTKSVF

SEQ ID NO: 268200 - protein, 15 aa, Artificial Sequence
  Description of Artificial Sequence: Synthetic peptide
  Seed: SIGKVCRTLLAKSVF
SIIKVYRKLLVKSVF

SEQ ID NO: 268201 - protein, 15 aa, Artificial Sequence
  Description of Artificial Sequence: Synthetic peptide
  Seed: SIGKVCRTLLAKSVF
SIIKVYRKLLWKSVF

SEQ ID NO: 268202 - protein, 15 aa, Artificial Sequence
  Description of Artificial Sequence: Synthetic peptide
  Seed: SIGKVCRTLLAKSVF
SIIKVYRKLLYKSVF

SEQ ID NO: 268203 - protein, 15 aa, Artificial Sequence
  Description of Artificial Sequence: Synthetic peptide
  Seed: SIGKVCRTLLAKSVF
SIIKVYRNLLAKSVF

SEQ ID NO: 268204 - protein, 15 aa, Artificial Sequence
  Description of Artificial Sequence: Synthetic peptide
  Seed: SIGKVCRTLLAKSVF
SIIKVYRNLLGKSVF

SEQ ID NO: 268205 - protein, 15 aa, Artificial Sequence
  Description of Artificial Sequence: Synthetic peptide
  Seed: SIGKVCRTLLAKSVF
SIIKVYRNLLHKSVF

SEQ ID NO: 268206 - protein, 15 aa, Artificial Sequence
  Description of Artificial Sequence: Synthetic peptide
  Seed: SIGKVCRTLLAKSVF
SIIKVYRNLLKKSVF

SEQ ID NO: 268207 - protein, 15 aa, Artificial Sequence
  Description of Artificial Sequence: Synthetic peptide
  Seed: SIGKVCRTLLAKSVF
SIIKVYRNLLRKSVF

SEQ ID NO: 268208 - protein, 15 aa, Artificial Sequence
  Description of Artificial Sequence: Synthetic peptide
  Seed: SIGKVCRTLLAKSVF
SIIKVYRNLLSKSVF

SEQ ID NO: 268209 - protein, 15 aa, Artificial Sequence
  Description of Artificial Sequence: Synthetic peptide
  Seed: SIGKVCRTLLAKSVF
SIIKVYRPLLAKSVF

SEQ ID NO: 268210 - protein, 15 aa, Artificial Sequence
  Description of Artificial Sequence: Synthetic peptide
  Seed: SIGKVCRTLLAKSVF
SIIKVYRPLLGKSVF

SEQ ID NO: 268211 - protein, 15 aa, Artificial Sequence
  Description of Artificial Sequence: Synthetic peptide
  Seed: SIGKVCRTLLAKSVF
SIIKVYRPLLHKSVF

SEQ ID NO: 268212 - protein, 15 aa, Artificial Sequence
  Description of Artificial Sequence: Synthetic peptide
  Seed: SIGKVCRTLLAKSVF
SIIKVYRPLLNKSVF

SEQ ID NO: 268213 - protein, 15 aa, Artificial Sequence
  Description of Artificial Sequence: Synthetic peptide
  Seed: SIGKVCRTLLAKSVF
SIIKVYRPLLQKSVF

SEQ ID NO: 268214 - protein, 15 aa, Artificial Sequence
  Description of Artificial Sequence: Synthetic peptide
  Seed: SIGKVCRTLLAKSVF
SIIKVYRPLLRKSVF

SEQ ID NO: 268215 - protein, 15 aa, Artificial Sequence
  Description of Artificial Sequence: Synthetic peptide
  Seed: SIGKVCRTLLAKSVF
SIIKVYRPLLSKSVF

SEQ ID NO: 268216 - protein, 15 aa, Artificial Sequence
  Description of Artificial Sequence: Synthetic peptide
  Seed: SIGKVCRTLLAKSVF
SIIKVYRPLLYKSVF

SEQ ID NO: 268217 - protein, 15 aa, Artificial Sequence
  Description of Artificial Sequence: Synthetic peptide
  Seed: SIGKVCRTLLAKSVF
SIIKVYRQLLHKSVF

SEQ ID NO: 268218 - protein, 15 aa, Artificial Sequence
  Description of Artificial Sequence: Synthetic peptide
  Seed: SIGKVCRTLLAKSVF
SIIKVYRQLLKKSVF

SEQ ID NO: 268219 - protein, 15 aa, Artificial Sequence
  Description of Artificial Sequence: Synthetic peptide
  Seed: SIGKVCRTLLAKSVF
SIIKVYRQLLRKSVF

SEQ ID NO: 268220 - protein, 15 aa, Artificial Sequence
  Description of Artificial Sequence: Synthetic peptide
  Seed: SIGKVCRTLLAKSVF
SIIKVYRQLLSKSVF

SEQ ID NO: 268221 - protein, 15 aa, Artificial Sequence
  Description of Artificial Sequence: Synthetic peptide
  Seed: SIGKVCRTLLAKSVF
SIIKVYRRLLAKSVF

SEQ ID NO: 268222 - protein, 15 aa, Artificial Sequence
  Description of Artificial Sequence: Synthetic peptide
  Seed: SIGKVCRTLLAKSVF
SIIKVYRRLLCKSVF

SEQ ID NO: 268223 - protein, 15 aa, Artificial Sequence
  Description of Artificial Sequence: Synthetic peptide
  Seed: SIGKVCRTLLAKSVF
SIIKVYRRLLDKSVF

SEQ ID NO: 268224 - protein, 15 aa, Artificial Sequence
  Description of Artificial Sequence: Synthetic peptide
  Seed: SIGKVCRTLLAKSVF
SIIKVYRRLLEKSVF

SEQ ID NO: 268225 - protein, 15 aa, Artificial Sequence
  Description of Artificial Sequence: Synthetic peptide
  Seed: SIGKVCRTLLAKSVF
SIIKVYRRLLFKSVF

SEQ ID NO: 268226 - protein, 15 aa, Artificial Sequence
  Description of Artificial Sequence: Synthetic peptide
  Seed: SIGKVCRTLLAKSVF
SIIKVYRRLLGKSVF

SEQ ID NO: 268227 - protein, 15 aa, Artificial Sequence
  Description of Artificial Sequence: Synthetic peptide
  Seed: SIGKVCRTLLAKSVF
SIIKVYRRLLHKSVF

SEQ ID NO: 268228 - protein, 15 aa, Artificial Sequence
  Description of Artificial Sequence: Synthetic peptide
  Seed: SIGKVCRTLLAKSVF
SIIKVYRRLLIKSVF

SEQ ID NO: 268229 - protein, 15 aa, Artificial Sequence
  Description of Artificial Sequence: Synthetic peptide
  Seed: SIGKVCRTLLAKSVF
SIIKVYRRLLKKSVF

SEQ ID NO: 268230 - protein, 15 aa, Artificial Sequence
  Description of Artificial Sequence: Synthetic peptide
  Seed: SIGKVCRTLLAKSVF
SIIKVYRRLLLKSVF

SEQ ID NO: 268231 - protein, 15 aa, Artificial Sequence
  Description of Artificial Sequence: Synthetic peptide
  Seed: SIGKVCRTLLAKSVF
SIIKVYRRLLMKSVF

SEQ ID NO: 268232 - protein, 15 aa, Artificial Sequence
  Description of Artificial Sequence: Synthetic peptide
  Seed: SIGKVCRTLLAKSVF
SIIKVYRRLLNKSVF

SEQ ID NO: 268233 - protein, 15 aa, Artificial Sequence
  Description of Artificial Sequence: Synthetic peptide
  Seed: SIGKVCRTLLAKSVF
SIIKVYRRLLPKSVF

SEQ ID NO: 268234 - protein, 15 aa, Artificial Sequence
  Description of Artificial Sequence: Synthetic peptide
  Seed: SIGKVCRTLLAKSVF
SIIKVYRRLLQKSVF

SEQ ID NO: 268235 - protein, 15 aa, Artificial Sequence
  Description of Artificial Sequence: Synthetic peptide
  Seed: SIGKVCRTLLAKSVF
SIIKVYRRLLRKSVF

SEQ ID NO: 268236 - protein, 15 aa, Artificial Sequence
  Description of Artificial Sequence: Synthetic peptide
  Seed: SIGKVCRTLLAKSVF
SIIKVYRRLLSKSVF

SEQ ID NO: 268237 - protein, 15 aa, Artificial Sequence
  Description of Artificial Sequence: Synthetic peptide
  Seed: SIGKVCRTLLAKSVF
SIIKVYRRLLTKSVF

SEQ ID NO: 268238 - protein, 15 aa, Artificial Sequence
  Description of Artificial Sequence: Synthetic peptide
  Seed: SIGKVCRTLLAKSVF
SIIKVYRRLLVKSVF

SEQ ID NO: 268239 - protein, 15 aa, Artificial Sequence
  Description of Artificial Sequence: Synthetic peptide
  Seed: SIGKVCRTLLAKSVF
SIIKVYRRLLYKSVF

SEQ ID NO: 268240 - protein, 15 aa, Artificial Sequence
  Description of Artificial Sequence: Synthetic peptide
  Seed: SIGKVCRTLLAKSVF
SIIKVYRSLLAKSVF

SEQ ID NO: 268241 - protein, 15 aa, Artificial Sequence
  Description of Artificial Sequence: Synthetic peptide
  Seed: SIGKVCRTLLAKSVF
SIIKVYRSLLGKSVF

SEQ ID NO: 268242 - protein, 15 aa, Artificial Sequence
  Description of Artificial Sequence: Synthetic peptide
  Seed: SIGKVCRTLLAKSVF
SIIKVYRSLLHKSVF

SEQ ID NO: 268243 - protein, 15 aa, Artificial Sequence
  Description of Artificial Sequence: Synthetic peptide
  Seed: SIGKVCRTLLAKSVF
SIIKVYRSLLKKSVF

SEQ ID NO: 268244 - protein, 15 aa, Artificial Sequence
  Description of Artificial Sequence: Synthetic peptide
  Seed: SIGKVCRTLLAKSVF
SIIKVYRSLLNKSVF

SEQ ID NO: 268245 - protein, 15 aa, Artificial Sequence
  Description of Artificial Sequence: Synthetic peptide
  Seed: SIGKVCRTLLAKSVF
SIIKVYRSLLQKSVF

SEQ ID NO: 268246 - protein, 15 aa, Artificial Sequence
  Description of Artificial Sequence: Synthetic peptide
  Seed: SIGKVCRTLLAKSVF
SIIKVYRSLLRKSVF

SEQ ID NO: 268247 - protein, 15 aa, Artificial Sequence
  Description of Artificial Sequence: Synthetic peptide
  Seed: SIGKVCRTLLAKSVF
SIIKVYRSLLSKSVF

SEQ ID NO: 268248 - protein, 15 aa, Artificial Sequence
  Description of Artificial Sequence: Synthetic peptide
  Seed: SIGKVCRTLLAKSVF
SIIKVYRTLLAKSVF

SEQ ID NO: 268249 - protein, 15 aa, Artificial Sequence
  Description of Artificial Sequence: Synthetic peptide
  Seed: SIGKVCRTLLAKSVF
SIIKVYRTLLGKSVF

SEQ ID NO: 268250 - protein, 15 aa, Artificial Sequence
  Description of Artificial Sequence: Synthetic peptide
  Seed: SIGKVCRTLLAKSVF
SIIKVYRTLLHKSVF

SEQ ID NO: 268251 - protein, 15 aa, Artificial Sequence
  Description of Artificial Sequence: Synthetic peptide
  Seed: SIGKVCRTLLAKSVF
SIIKVYRTLLKKSVF

SEQ ID NO: 268252 - protein, 15 aa, Artificial Sequence
  Description of Artificial Sequence: Synthetic peptide
  Seed: SIGKVCRTLLAKSVF
SIIKVYRTLLQKSVF

SEQ ID NO: 268253 - protein, 15 aa, Artificial Sequence
  Description of Artificial Sequence: Synthetic peptide
  Seed: SIGKVCRTLLAKSVF
SIIKVYRTLLRKSVF

SEQ ID NO: 268254 - protein, 15 aa, Artificial Sequence
  Description of Artificial Sequence: Synthetic peptide
  Seed: SIGKVCRTLLAKSVF
SIIKVYRTLLSKSVF

SEQ ID NO: 268255 - protein, 15 aa, Artificial Sequence
  Description of Artificial Sequence: Synthetic peptide
  Seed: SIGKVCRTLLAKSVF
SIIKVYRVLLHKSVF

SEQ ID NO: 268256 - protein, 15 aa, Artificial Sequence
  Description of Artificial Sequence: Synthetic peptide
  Seed: SIGKVCRTLLAKSVF
SIKKVIRKLLAKSVF

SEQ ID NO: 268257 - protein, 15 aa, Artificial Sequence
  Description of Artificial Sequence: Synthetic peptide
  Seed: SIGKVCRTLLAKSVF
SIKKVIRKLLSKSVF

SEQ ID NO: 268258 - protein, 15 aa, Artificial Sequence
  Description of Artificial Sequence: Synthetic peptide
  Seed: SIGKVCRTLLAKSVF
SIKKVIRRLLAKSVF

SEQ ID NO: 268259 - protein, 15 aa, Artificial Sequence
  Description of Artificial Sequence: Synthetic peptide
  Seed: SIGKVCRTLLAKSVF
SIKKVIRRLLSKSVF

SEQ ID NO: 268260 - protein, 15 aa, Artificial Sequence
  Description of Artificial Sequence: Synthetic peptide
  Seed: SIGKVCRTLLAKSVF
SIKKVLRKLLAKSVF

SEQ ID NO: 268261 - protein, 15 aa, Artificial Sequence
  Description of Artificial Sequence: Synthetic peptide
  Seed: SIGKVCRTLLAKSVF
SIKKVLRKLLGKSVF

SEQ ID NO: 268262 - protein, 15 aa, Artificial Sequence
  Description of Artificial Sequence: Synthetic peptide
  Seed: SIGKVCRTLLAKSVF
SIKKVLRKLLSKSVF

SEQ ID NO: 268263 - protein, 15 aa, Artificial Sequence
  Description of Artificial Sequence: Synthetic peptide
  Seed: SIGKVCRTLLAKSVF
SIKKVLRRLLAKSVF

SEQ ID NO: 268264 - protein, 15 aa, Artificial Sequence
  Description of Artificial Sequence: Synthetic peptide
  Seed: SIGKVCRTLLAKSVF
SIKKVLRRLLGKSVF

SEQ ID NO: 268265 - protein, 15 aa, Artificial Sequence
  Description of Artificial Sequence: Synthetic peptide
  Seed: SIGKVCRTLLAKSVF
SIKKVLRRLLSKSVF

SEQ ID NO: 268266 - protein, 15 aa, Artificial Sequence
  Description of Artificial Sequence: Synthetic peptide
  Seed: SIGKVCRTLLAKSVF
SIKKVMRKLLAKSVF

SEQ ID NO: 268267 - protein, 15 aa, Artificial Sequence
  Description of Artificial Sequence: Synthetic peptide
  Seed: SIGKVCRTLLAKSVF
SIKKVMRKLLCKSVF

SEQ ID NO: 268268 - protein, 15 aa, Artificial Sequence
  Description of Artificial Sequence: Synthetic peptide
  Seed: SIGKVCRTLLAKSVF
SIKKVMRKLLGKSVF

SEQ ID NO: 268269 - protein, 15 aa, Artificial Sequence
  Description of Artificial Sequence: Synthetic peptide
  Seed: SIGKVCRTLLAKSVF
SIKKVMRKLLSKSVF

SEQ ID NO: 268270 - protein, 15 aa, Artificial Sequence
  Description of Artificial Sequence: Synthetic peptide
  Seed: SIGKVCRTLLAKSVF
SIKKVMRKLLTKSVF

SEQ ID NO: 268271 - protein, 15 aa, Artificial Sequence
  Description of Artificial Sequence: Synthetic peptide
  Seed: SIGKVCRTLLAKSVF
SIKKVMRRLLAKSVF

SEQ ID NO: 268272 - protein, 15 aa, Artificial Sequence
  Description of Artificial Sequence: Synthetic peptide
  Seed: SIGKVCRTLLAKSVF
SIKKVMRRLLGKSVF

SEQ ID NO: 268273 - protein, 15 aa, Artificial Sequence
  Description of Artificial Sequence: Synthetic peptide
  Seed: SIGKVCRTLLAKSVF
SIKKVMRRLLMKSVF

SEQ ID NO: 268274 - protein, 15 aa, Artificial Sequence
  Description of Artificial Sequence: Synthetic peptide
  Seed: SIGKVCRTLLAKSVF
SIKKVMRRLLQKSVF

SEQ ID NO: 268275 - protein, 15 aa, Artificial Sequence
  Description of Artificial Sequence: Synthetic peptide
  Seed: SIGKVCRTLLAKSVF
SIKKVMRRLLSKSVF

SEQ ID NO: 268276 - protein, 15 aa, Artificial Sequence
  Description of Artificial Sequence: Synthetic peptide
  Seed: SIGKVCRTLLAKSVF
SIKKVMRRLLVKSVF

SEQ ID NO: 268277 - protein, 15 aa, Artificial Sequence
  Description of Artificial Sequence: Synthetic peptide
  Seed: SIGKVCRTLLAKSVF
SILKVARALLAKSVF

SEQ ID NO: 268278 - protein, 15 aa, Artificial Sequence
  Description of Artificial Sequence: Synthetic peptide
  Seed: SIGKVCRTLLAKSVF
SILKVARALLGKSVF

SEQ ID NO: 268279 - protein, 15 aa, Artificial Sequence
  Description of Artificial Sequence: Synthetic peptide
  Seed: SIGKVCRTLLAKSVF
SILKVARALLHKSVF

SEQ ID NO: 268280 - protein, 15 aa, Artificial Sequence
  Description of Artificial Sequence: Synthetic peptide
  Seed: SIGKVCRTLLAKSVF
SILKVARALLKKSVF

SEQ ID NO: 268281 - protein, 15 aa, Artificial Sequence
  Description of Artificial Sequence: Synthetic peptide
  Seed: SIGKVCRTLLAKSVF
SILKVARALLMKSVF

SEQ ID NO: 268282 - protein, 15 aa, Artificial Sequence
  Description of Artificial Sequence: Synthetic peptide
  Seed: SIGKVCRTLLAKSVF
SILKVARALLNKSVF

SEQ ID NO: 268283 - protein, 15 aa, Artificial Sequence
  Description of Artificial Sequence: Synthetic peptide
  Seed: SIGKVCRTLLAKSVF
SILKVARALLQKSVF

SEQ ID NO: 268284 - protein, 15 aa, Artificial Sequence
  Description of Artificial Sequence: Synthetic peptide
  Seed: SIGKVCRTLLAKSVF
SILKVARALLRKSVF

SEQ ID NO: 268285 - protein, 15 aa, Artificial Sequence
  Description of Artificial Sequence: Synthetic peptide
  Seed: SIGKVCRTLLAKSVF
SILKVARALLSKSVF

SEQ ID NO: 268286 - protein, 15 aa, Artificial Sequence
  Description of Artificial Sequence: Synthetic peptide
  Seed: SIGKVCRTLLAKSVF
SILKVARALLTKSVF

SEQ ID NO: 268287 - protein, 15 aa, Artificial Sequence
  Description of Artificial Sequence: Synthetic peptide
  Seed: SIGKVCRTLLAKSVF
SILKVARALLVKSVF

SEQ ID NO: 268288 - protein, 15 aa, Artificial Sequence
  Description of Artificial Sequence: Synthetic peptide
  Seed: SIGKVCRTLLAKSVF
SILKVARALLYKSVF

SEQ ID NO: 268289 - protein, 15 aa, Artificial Sequence
  Description of Artificial Sequence: Synthetic peptide
  Seed: SIGKVCRTLLAKSVF
SILKVARDLLAKSVF

SEQ ID NO: 268290 - protein, 15 aa, Artificial Sequence
  Description of Artificial Sequence: Synthetic peptide
  Seed: SIGKVCRTLLAKSVF
SILKVARDLLSKSVF

SEQ ID NO: 268291 - protein, 15 aa, Artificial Sequence
  Description of Artificial Sequence: Synthetic peptide
  Seed: SIGKVCRTLLAKSVF
SILKVARELLKKSVF

SEQ ID NO: 268292 - protein, 15 aa, Artificial Sequence
  Description of Artificial Sequence: Synthetic peptide
  Seed: SIGKVCRTLLAKSVF
SILKVARELLRKSVF

SEQ ID NO: 268293 - protein, 15 aa, Artificial Sequence
  Description of Artificial Sequence: Synthetic peptide
  Seed: SIGKVCRTLLAKSVF
SILKVARGLLAKSVF

SEQ ID NO: 268294 - protein, 15 aa, Artificial Sequence
  Description of Artificial Sequence: Synthetic peptide
  Seed: SIGKVCRTLLAKSVF
SILKVARGLLGKSVF

SEQ ID NO: 268295 - protein, 15 aa, Artificial Sequence
  Description of Artificial Sequence: Synthetic peptide
  Seed: SIGKVCRTLLAKSVF
SILKVARGLLQKSVF

SEQ ID NO: 268296 - protein, 15 aa, Artificial Sequence
  Description of Artificial Sequence: Synthetic peptide
  Seed: SIGKVCRTLLAKSVF
SILKVARGLLSKSVF

SEQ ID NO: 268297 - protein, 15 aa, Artificial Sequence
  Description of Artificial Sequence: Synthetic peptide
  Seed: SIGKVCRTLLAKSVF
SILKVARHLLAKSVF

SEQ ID NO: 268298 - protein, 15 aa, Artificial Sequence
  Description of Artificial Sequence: Synthetic peptide
  Seed: SIGKVCRTLLAKSVF
SILKVARHLLEKSVF

SEQ ID NO: 268299 - protein, 15 aa, Artificial Sequence
  Description of Artificial Sequence: Synthetic peptide
  Seed: SIGKVCRTLLAKSVF
SILKVARHLLGKSVF

SEQ ID NO: 268300 - protein, 15 aa, Artificial Sequence
  Description of Artificial Sequence: Synthetic peptide
  Seed: SIGKVCRTLLAKSVF
SILKVARHLLHKSVF

SEQ ID NO: 268301 - protein, 15 aa, Artificial Sequence
  Description of Artificial Sequence: Synthetic peptide
  Seed: SIGKVCRTLLAKSVF
SILKVARHLLIKSVF

SEQ ID NO: 268302 - protein, 15 aa, Artificial Sequence
  Description of Artificial Sequence: Synthetic peptide
  Seed: SIGKVCRTLLAKSVF
SILKVARHLLKKSVF

SEQ ID NO: 268303 - protein, 15 aa, Artificial Sequence
  Description of Artificial Sequence: Synthetic peptide
  Seed: SIGKVCRTLLAKSVF
SILKVARHLLLKSVF

SEQ ID NO: 268304 - protein, 15 aa, Artificial Sequence
  Description of Artificial Sequence: Synthetic peptide
  Seed: SIGKVCRTLLAKSVF
SILKVARHLLMKSVF

SEQ ID NO: 268305 - protein, 15 aa, Artificial Sequence
  Description of Artificial Sequence: Synthetic peptide
  Seed: SIGKVCRTLLAKSVF
SILKVARHLLNKSVF

SEQ ID NO: 268306 - protein, 15 aa, Artificial Sequence
  Description of Artificial Sequence: Synthetic peptide
  Seed: SIGKVCRTLLAKSVF
SILKVARHLLPKSVF

SEQ ID NO: 268307 - protein, 15 aa, Artificial Sequence
  Description of Artificial Sequence: Synthetic peptide
  Seed: SIGKVCRTLLAKSVF
SILKVARHLLQKSVF

SEQ ID NO: 268308 - protein, 15 aa, Artificial Sequence
  Description of Artificial Sequence: Synthetic peptide
  Seed: SIGKVCRTLLAKSVF
SILKVARHLLRKSVF

SEQ ID NO: 268309 - protein, 15 aa, Artificial Sequence
  Description of Artificial Sequence: Synthetic peptide
  Seed: SIGKVCRTLLAKSVF
SILKVARHLLSKSVF

SEQ ID NO: 268310 - protein, 15 aa, Artificial Sequence
  Description of Artificial Sequence: Synthetic peptide
  Seed: SIGKVCRTLLAKSVF
SILKVARHLLTKSVF

SEQ ID NO: 268311 - protein, 15 aa, Artificial Sequence
  Description of Artificial Sequence: Synthetic peptide
  Seed: SIGKVCRTLLAKSVF
SILKVARHLLVKSVF

SEQ ID NO: 268312 - protein, 15 aa, Artificial Sequence
  Description of Artificial Sequence: Synthetic peptide
  Seed: SIGKVCRTLLAKSVF
SILKVARHLLYKSVF

SEQ ID NO: 268313 - protein, 15 aa, Artificial Sequence
  Description of Artificial Sequence: Synthetic peptide
  Seed: SIGKVCRTLLAKSVF
SILKVARILLHKSVF

SEQ ID NO: 268314 - protein, 15 aa, Artificial Sequence
  Description of Artificial Sequence: Synthetic peptide
  Seed: SIGKVCRTLLAKSVF
SILKVARILLKKSVF

SEQ ID NO: 268315 - protein, 15 aa, Artificial Sequence
  Description of Artificial Sequence: Synthetic peptide
  Seed: SIGKVCRTLLAKSVF
SILKVARILLRKSVF

SEQ ID NO: 268316 - protein, 15 aa, Artificial Sequence
  Description of Artificial Sequence: Synthetic peptide
  Seed: SIGKVCRTLLAKSVF
SILKVARILLSKSVF

SEQ ID NO: 268317 - protein, 15 aa, Artificial Sequence
  Description of Artificial Sequence: Synthetic peptide
  Seed: SIGKVCRTLLAKSVF
SILKVARKLLAKSVF

SEQ ID NO: 268318 - protein, 15 aa, Artificial Sequence
  Description of Artificial Sequence: Synthetic peptide
  Seed: SIGKVCRTLLAKSVF
SILKVARKLLCKSVF

SEQ ID NO: 268319 - protein, 15 aa, Artificial Sequence
  Description of Artificial Sequence: Synthetic peptide
  Seed: SIGKVCRTLLAKSVF
SILKVARKLLDKSVF

SEQ ID NO: 268320 - protein, 15 aa, Artificial Sequence
  Description of Artificial Sequence: Synthetic peptide
  Seed: SIGKVCRTLLAKSVF
SILKVARKLLEKSVF

SEQ ID NO: 268321 - protein, 15 aa, Artificial Sequence
  Description of Artificial Sequence: Synthetic peptide
  Seed: SIGKVCRTLLAKSVF
SILKVARKLLFKSVF

SEQ ID NO: 268322 - protein, 15 aa, Artificial Sequence
  Description of Artificial Sequence: Synthetic peptide
  Seed: SIGKVCRTLLAKSVF
SILKVARKLLGKSVF

SEQ ID NO: 268323 - protein, 15 aa, Artificial Sequence
  Description of Artificial Sequence: Synthetic peptide
  Seed: SIGKVCRTLLAKSVF
SILKVARKLLHKSVF

SEQ ID NO: 268324 - protein, 15 aa, Artificial Sequence
  Description of Artificial Sequence: Synthetic peptide
  Seed: SIGKVCRTLLAKSVF
SILKVARKLLIKSVF

SEQ ID NO: 268325 - protein, 15 aa, Artificial Sequence
  Description of Artificial Sequence: Synthetic peptide
  Seed: SIGKVCRTLLAKSVF
SILKVARKLLKKSVF

SEQ ID NO: 268326 - protein, 15 aa, Artificial Sequence
  Description of Artificial Sequence: Synthetic peptide
  Seed: SIGKVCRTLLAKSVF
SILKVARKLLLKSVF

SEQ ID NO: 268327 - protein, 15 aa, Artificial Sequence
  Description of Artificial Sequence: Synthetic peptide
  Seed: SIGKVCRTLLAKSVF
SILKVARKLLMKSVF

SEQ ID NO: 268328 - protein, 15 aa, Artificial Sequence
  Description of Artificial Sequence: Synthetic peptide
  Seed: SIGKVCRTLLAKSVF
SILKVARKLLNKSVF

SEQ ID NO: 268329 - protein, 15 aa, Artificial Sequence
  Description of Artificial Sequence: Synthetic peptide
  Seed: SIGKVCRTLLAKSVF
SILKVARKLLPKSVF

SEQ ID NO: 268330 - protein, 15 aa, Artificial Sequence
  Description of Artificial Sequence: Synthetic peptide
  Seed: SIGKVCRTLLAKSVF
SILKVARKLLQKSVF

SEQ ID NO: 268331 - protein, 15 aa, Artificial Sequence
  Description of Artificial Sequence: Synthetic peptide
  Seed: SIGKVCRTLLAKSVF
SILKVARKLLRKSVF

SEQ ID NO: 268332 - protein, 15 aa, Artificial Sequence
  Description of Artificial Sequence: Synthetic peptide
  Seed: SIGKVCRTLLAKSVF
SILKVARKLLSKSVF

SEQ ID NO: 268333 - protein, 15 aa, Artificial Sequence
  Description of Artificial Sequence: Synthetic peptide
  Seed: SIGKVCRTLLAKSVF
SILKVARKLLTKSVF

SEQ ID NO: 268334 - protein, 15 aa, Artificial Sequence
  Description of Artificial Sequence: Synthetic peptide
  Seed: SIGKVCRTLLAKSVF
SILKVARKLLVKSVF

SEQ ID NO: 268335 - protein, 15 aa, Artificial Sequence
  Description of Artificial Sequence: Synthetic peptide
  Seed: SIGKVCRTLLAKSVF
SILKVARKLLWKSVF

SEQ ID NO: 268336 - protein, 15 aa, Artificial Sequence
  Description of Artificial Sequence: Synthetic peptide
  Seed: SIGKVCRTLLAKSVF
SILKVARKLLYKSVF

SEQ ID NO: 268337 - protein, 15 aa, Artificial Sequence
  Description of Artificial Sequence: Synthetic peptide
  Seed: SIGKVCRTLLAKSVF
SILKVARMLLRKSVF

SEQ ID NO: 268338 - protein, 15 aa, Artificial Sequence
  Description of Artificial Sequence: Synthetic peptide
  Seed: SIGKVCRTLLAKSVF
SILKVARNLLAKSVF

SEQ ID NO: 268339 - protein, 15 aa, Artificial Sequence
  Description of Artificial Sequence: Synthetic peptide
  Seed: SIGKVCRTLLAKSVF
SILKVARNLLDKSVF

SEQ ID NO: 268340 - protein, 15 aa, Artificial Sequence
  Description of Artificial Sequence: Synthetic peptide
  Seed: SIGKVCRTLLAKSVF
SILKVARNLLGKSVF

SEQ ID NO: 268341 - protein, 15 aa, Artificial Sequence
  Description of Artificial Sequence: Synthetic peptide
  Seed: SIGKVCRTLLAKSVF
SILKVARNLLHKSVF

SEQ ID NO: 268342 - protein, 15 aa, Artificial Sequence
  Description of Artificial Sequence: Synthetic peptide
  Seed: SIGKVCRTLLAKSVF
SILKVARNLLMKSVF

SEQ ID NO: 268343 - protein, 15 aa, Artificial Sequence
  Description of Artificial Sequence: Synthetic peptide
  Seed: SIGKVCRTLLAKSVF
SILKVARNLLNKSVF

SEQ ID NO: 268344 - protein, 15 aa, Artificial Sequence
  Description of Artificial Sequence: Synthetic peptide
  Seed: SIGKVCRTLLAKSVF
SILKVARNLLQKSVF

SEQ ID NO: 268345 - protein, 15 aa, Artificial Sequence
  Description of Artificial Sequence: Synthetic peptide
  Seed: SIGKVCRTLLAKSVF
SILKVARNLLRKSVF

SEQ ID NO: 268346 - protein, 15 aa, Artificial Sequence
  Description of Artificial Sequence: Synthetic peptide
  Seed: SIGKVCRTLLAKSVF
SILKVARNLLSKSVF

SEQ ID NO: 268347 - protein, 15 aa, Artificial Sequence
  Description of Artificial Sequence: Synthetic peptide
  Seed: SIGKVCRTLLAKSVF
SILKVARNLLTKSVF

SEQ ID NO: 268348 - protein, 15 aa, Artificial Sequence
  Description of Artificial Sequence: Synthetic peptide
  Seed: SIGKVCRTLLAKSVF
SILKVARNLLVKSVF

SEQ ID NO: 268349 - protein, 15 aa, Artificial Sequence
  Description of Artificial Sequence: Synthetic peptide
  Seed: SIGKVCRTLLAKSVF
SILKVARNLLYKSVF

SEQ ID NO: 268350 - protein, 15 aa, Artificial Sequence
  Description of Artificial Sequence: Synthetic peptide
  Seed: SIGKVCRTLLAKSVF
SILKVARPLLAKSVF

SEQ ID NO: 268351 - protein, 15 aa, Artificial Sequence
  Description of Artificial Sequence: Synthetic peptide
  Seed: SIGKVCRTLLAKSVF
SILKVARPLLGKSVF

SEQ ID NO: 268352 - protein, 15 aa, Artificial Sequence
  Description of Artificial Sequence: Synthetic peptide
  Seed: SIGKVCRTLLAKSVF
SILKVARPLLQKSVF

SEQ ID NO: 268353 - protein, 15 aa, Artificial Sequence
  Description of Artificial Sequence: Synthetic peptide
  Seed: SIGKVCRTLLAKSVF
SILKVARPLLRKSVF

SEQ ID NO: 268354 - protein, 15 aa, Artificial Sequence
  Description of Artificial Sequence: Synthetic peptide
  Seed: SIGKVCRTLLAKSVF
SILKVARPLLSKSVF

SEQ ID NO: 268355 - protein, 15 aa, Artificial Sequence
  Description of Artificial Sequence: Synthetic peptide
  Seed: SIGKVCRTLLAKSVF
SILKVARPLLYKSVF

SEQ ID NO: 268356 - protein, 15 aa, Artificial Sequence
  Description of Artificial Sequence: Synthetic peptide
  Seed: SIGKVCRTLLAKSVF
SILKVARQLLAKSVF

SEQ ID NO: 268357 - protein, 15 aa, Artificial Sequence
  Description of Artificial Sequence: Synthetic peptide
  Seed: SIGKVCRTLLAKSVF
SILKVARQLLGKSVF

SEQ ID NO: 268358 - protein, 15 aa, Artificial Sequence
  Description of Artificial Sequence: Synthetic peptide
  Seed: SIGKVCRTLLAKSVF
SILKVARQLLHKSVF

SEQ ID NO: 268359 - protein, 15 aa, Artificial Sequence
  Description of Artificial Sequence: Synthetic peptide
  Seed: SIGKVCRTLLAKSVF
SILKVARQLLNKSVF

SEQ ID NO: 268360 - protein, 15 aa, Artificial Sequence
  Description of Artificial Sequence: Synthetic peptide
  Seed: SIGKVCRTLLAKSVF
SILKVARQLLQKSVF

SEQ ID NO: 268361 - protein, 15 aa, Artificial Sequence
  Description of Artificial Sequence: Synthetic peptide
  Seed: SIGKVCRTLLAKSVF
SILKVARQLLRKSVF

SEQ ID NO: 268362 - protein, 15 aa, Artificial Sequence
  Description of Artificial Sequence: Synthetic peptide
  Seed: SIGKVCRTLLAKSVF
SILKVARQLLSKSVF

SEQ ID NO: 268363 - protein, 15 aa, Artificial Sequence
  Description of Artificial Sequence: Synthetic peptide
  Seed: SIGKVCRTLLAKSVF
SILKVARQLLTKSVF

SEQ ID NO: 268364 - protein, 15 aa, Artificial Sequence
  Description of Artificial Sequence: Synthetic peptide
  Seed: SIGKVCRTLLAKSVF
SILKVARQLLYKSVF

SEQ ID NO: 268365 - protein, 15 aa, Artificial Sequence
  Description of Artificial Sequence: Synthetic peptide
  Seed: SIGKVCRTLLAKSVF
SILKVARRLLAKSVF

SEQ ID NO: 268366 - protein, 15 aa, Artificial Sequence
  Description of Artificial Sequence: Synthetic peptide
  Seed: SIGKVCRTLLAKSVF
SILKVARRLLCKSVF

SEQ ID NO: 268367 - protein, 15 aa, Artificial Sequence
  Description of Artificial Sequence: Synthetic peptide
  Seed: SIGKVCRTLLAKSVF
SILKVARRLLDKSVF

SEQ ID NO: 268368 - protein, 15 aa, Artificial Sequence
  Description of Artificial Sequence: Synthetic peptide
  Seed: SIGKVCRTLLAKSVF
SILKVARRLLEKSVF

SEQ ID NO: 268369 - protein, 15 aa, Artificial Sequence
  Description of Artificial Sequence: Synthetic peptide
  Seed: SIGKVCRTLLAKSVF
SILKVARRLLFKSVF

SEQ ID NO: 268370 - protein, 15 aa, Artificial Sequence
  Description of Artificial Sequence: Synthetic peptide
  Seed: SIGKVCRTLLAKSVF
SILKVARRLLGKSVF

SEQ ID NO: 268371 - protein, 15 aa, Artificial Sequence
  Description of Artificial Sequence: Synthetic peptide
  Seed: SIGKVCRTLLAKSVF
SILKVARRLLHKSVF

SEQ ID NO: 268372 - protein, 15 aa, Artificial Sequence
  Description of Artificial Sequence: Synthetic peptide
  Seed: SIGKVCRTLLAKSVF
SILKVARRLLIKSVF

SEQ ID NO: 268373 - protein, 15 aa, Artificial Sequence
  Description of Artificial Sequence: Synthetic peptide
  Seed: SIGKVCRTLLAKSVF
SILKVARRLLKKSVF

SEQ ID NO: 268374 - protein, 15 aa, Artificial Sequence
  Description of Artificial Sequence: Synthetic peptide
  Seed: SIGKVCRTLLAKSVF
SILKVARRLLLKSVF

SEQ ID NO: 268375 - protein, 15 aa, Artificial Sequence
  Description of Artificial Sequence: Synthetic peptide
  Seed: SIGKVCRTLLAKSVF
SILKVARRLLMKSVF

SEQ ID NO: 268376 - protein, 15 aa, Artificial Sequence
  Description of Artificial Sequence: Synthetic peptide
  Seed: SIGKVCRTLLAKSVF
SILKVARRLLNKSVF

SEQ ID NO: 268377 - protein, 15 aa, Artificial Sequence
  Description of Artificial Sequence: Synthetic peptide
  Seed: SIGKVCRTLLAKSVF
SILKVARRLLPKSVF

SEQ ID NO: 268378 - protein, 15 aa, Artificial Sequence
  Description of Artificial Sequence: Synthetic peptide
  Seed: SIGKVCRTLLAKSVF
SILKVARRLLQKSVF

SEQ ID NO: 268379 - protein, 15 aa, Artificial Sequence
  Description of Artificial Sequence: Synthetic peptide
  Seed: SIGKVCRTLLAKSVF
SILKVARRLLRKSVF

SEQ ID NO: 268380 - protein, 15 aa, Artificial Sequence
  Description of Artificial Sequence: Synthetic peptide
  Seed: SIGKVCRTLLAKSVF
SILKVARRLLSKSVF

SEQ ID NO: 268381 - protein, 15 aa, Artificial Sequence
  Description of Artificial Sequence: Synthetic peptide
  Seed: SIGKVCRTLLAKSVF
SILKVARRLLTKSVF

SEQ ID NO: 268382 - protein, 15 aa, Artificial Sequence
  Description of Artificial Sequence: Synthetic peptide
  Seed: SIGKVCRTLLAKSVF
SILKVARRLLVKSVF

SEQ ID NO: 268383 - protein, 15 aa, Artificial Sequence
  Description of Artificial Sequence: Synthetic peptide
  Seed: SIGKVCRTLLAKSVF
SILKVARRLLWKSVF

SEQ ID NO: 268384 - protein, 15 aa, Artificial Sequence
  Description of Artificial Sequence: Synthetic peptide
  Seed: SIGKVCRTLLAKSVF
SILKVARRLLYKSVF

SEQ ID NO: 268385 - protein, 15 aa, Artificial Sequence
  Description of Artificial Sequence: Synthetic peptide
  Seed: SIGKVCRTLLAKSVF
SILKVARSLLAKSVF

SEQ ID NO: 268386 - protein, 15 aa, Artificial Sequence
  Description of Artificial Sequence: Synthetic peptide
  Seed: SIGKVCRTLLAKSVF
SILKVARSLLDKSVF

SEQ ID NO: 268387 - protein, 15 aa, Artificial Sequence
  Description of Artificial Sequence: Synthetic peptide
  Seed: SIGKVCRTLLAKSVF
SILKVARSLLGKSVF

SEQ ID NO: 268388 - protein, 15 aa, Artificial Sequence
  Description of Artificial Sequence: Synthetic peptide
  Seed: SIGKVCRTLLAKSVF
SILKVARSLLHKSVF

SEQ ID NO: 268389 - protein, 15 aa, Artificial Sequence
  Description of Artificial Sequence: Synthetic peptide
  Seed: SIGKVCRTLLAKSVF
SILKVARSLLKKSVF

SEQ ID NO: 268390 - protein, 15 aa, Artificial Sequence
  Description of Artificial Sequence: Synthetic peptide
  Seed: SIGKVCRTLLAKSVF
SILKVARSLLMKSVF

SEQ ID NO: 268391 - protein, 15 aa, Artificial Sequence
  Description of Artificial Sequence: Synthetic peptide
  Seed: SIGKVCRTLLAKSVF
SILKVARSLLNKSVF

SEQ ID NO: 268392 - protein, 15 aa, Artificial Sequence
  Description of Artificial Sequence: Synthetic peptide
  Seed: SIGKVCRTLLAKSVF
SILKVARSLLQKSVF

SEQ ID NO: 268393 - protein, 15 aa, Artificial Sequence
  Description of Artificial Sequence: Synthetic peptide
  Seed: SIGKVCRTLLAKSVF
SILKVARSLLRKSVF

SEQ ID NO: 268394 - protein, 15 aa, Artificial Sequence
  Description of Artificial Sequence: Synthetic peptide
  Seed: SIGKVCRTLLAKSVF
SILKVARSLLSKSVF

SEQ ID NO: 268395 - protein, 15 aa, Artificial Sequence
  Description of Artificial Sequence: Synthetic peptide
  Seed: SIGKVCRTLLAKSVF
SILKVARSLLTKSVF

SEQ ID NO: 268396 - protein, 15 aa, Artificial Sequence
  Description of Artificial Sequence: Synthetic peptide
  Seed: SIGKVCRTLLAKSVF
SILKVARSLLVKSVF

SEQ ID NO: 268397 - protein, 15 aa, Artificial Sequence
  Description of Artificial Sequence: Synthetic peptide
  Seed: SIGKVCRTLLAKSVF
SILKVARSLLYKSVF

SEQ ID NO: 268398 - protein, 15 aa, Artificial Sequence
  Description of Artificial Sequence: Synthetic peptide
  Seed: SIGKVCRTLLAKSVF
SILKVARTLLAKSVF

SEQ ID NO: 268399 - protein, 15 aa, Artificial Sequence
  Description of Artificial Sequence: Synthetic peptide
  Seed: SIGKVCRTLLAKSVF
SILKVARTLLDKSVF

SEQ ID NO: 268400 - protein, 15 aa, Artificial Sequence
  Description of Artificial Sequence: Synthetic peptide
  Seed: SIGKVCRTLLAKSVF
SILKVARTLLGKSVF

SEQ ID NO: 268401 - protein, 15 aa, Artificial Sequence
  Description of Artificial Sequence: Synthetic peptide
  Seed: SIGKVCRTLLAKSVF
SILKVARTLLHKSVF

SEQ ID NO: 268402 - protein, 15 aa, Artificial Sequence
  Description of Artificial Sequence: Synthetic peptide
  Seed: SIGKVCRTLLAKSVF
SILKVARTLLKKSVF

SEQ ID NO: 268403 - protein, 15 aa, Artificial Sequence
  Description of Artificial Sequence: Synthetic peptide
  Seed: SIGKVCRTLLAKSVF
SILKVARTLLMKSVF

SEQ ID NO: 268404 - protein, 15 aa, Artificial Sequence
  Description of Artificial Sequence: Synthetic peptide
  Seed: SIGKVCRTLLAKSVF
SILKVARTLLNKSVF

SEQ ID NO: 268405 - protein, 15 aa, Artificial Sequence
  Description of Artificial Sequence: Synthetic peptide
  Seed: SIGKVCRTLLAKSVF
SILKVARTLLQKSVF

SEQ ID NO: 268406 - protein, 15 aa, Artificial Sequence
  Description of Artificial Sequence: Synthetic peptide
  Seed: SIGKVCRTLLAKSVF
SILKVARTLLRKSVF

SEQ ID NO: 268407 - protein, 15 aa, Artificial Sequence
  Description of Artificial Sequence: Synthetic peptide
  Seed: SIGKVCRTLLAKSVF
SILKVARTLLSKSVF

SEQ ID NO: 268408 - protein, 15 aa, Artificial Sequence
  Description of Artificial Sequence: Synthetic peptide
  Seed: SIGKVCRTLLAKSVF
SILKVARTLLTKSVF

SEQ ID NO: 268409 - protein, 15 aa, Artificial Sequence
  Description of Artificial Sequence: Synthetic peptide
  Seed: SIGKVCRTLLAKSVF
SILKVARTLLVKSVF

SEQ ID NO: 268410 - protein, 15 aa, Artificial Sequence
  Description of Artificial Sequence: Synthetic peptide
  Seed: SIGKVCRTLLAKSVF
SILKVARTLLYKSVF

SEQ ID NO: 268411 - protein, 15 aa, Artificial Sequence
  Description of Artificial Sequence: Synthetic peptide
  Seed: SIGKVCRTLLAKSVF
SILKVARVLLAKSVF

SEQ ID NO: 268412 - protein, 15 aa, Artificial Sequence
  Description of Artificial Sequence: Synthetic peptide
  Seed: SIGKVCRTLLAKSVF
SILKVARVLLGKSVF

SEQ ID NO: 268413 - protein, 15 aa, Artificial Sequence
  Description of Artificial Sequence: Synthetic peptide
  Seed: SIGKVCRTLLAKSVF
SILKVARVLLHKSVF

SEQ ID NO: 268414 - protein, 15 aa, Artificial Sequence
  Description of Artificial Sequence: Synthetic peptide
  Seed: SIGKVCRTLLAKSVF
SILKVARVLLKKSVF

SEQ ID NO: 268415 - protein, 15 aa, Artificial Sequence
  Description of Artificial Sequence: Synthetic peptide
  Seed: SIGKVCRTLLAKSVF
SILKVARVLLQKSVF

SEQ ID NO: 268416 - protein, 15 aa, Artificial Sequence
  Description of Artificial Sequence: Synthetic peptide
  Seed: SIGKVCRTLLAKSVF
SILKVARVLLRKSVF

SEQ ID NO: 268417 - protein, 15 aa, Artificial Sequence
  Description of Artificial Sequence: Synthetic peptide
  Seed: SIGKVCRTLLAKSVF
SILKVARVLLSKSVF

SEQ ID NO: 268418 - protein, 15 aa, Artificial Sequence
  Description of Artificial Sequence: Synthetic peptide
  Seed: SIGKVCRTLLAKSVF
SILKVCRALLAKSVF

SEQ ID NO: 268419 - protein, 15 aa, Artificial Sequence
  Description of Artificial Sequence: Synthetic peptide
  Seed: SIGKVCRTLLAKSVF
SILKVCRALLGKSVF

SEQ ID NO: 268420 - protein, 15 aa, Artificial Sequence
  Description of Artificial Sequence: Synthetic peptide
  Seed: SIGKVCRTLLAKSVF
SILKVCRALLHKSVF

SEQ ID NO: 268421 - protein, 15 aa, Artificial Sequence
  Description of Artificial Sequence: Synthetic peptide
  Seed: SIGKVCRTLLAKSVF
SILKVCRALLKKSVF

SEQ ID NO: 268422 - protein, 15 aa, Artificial Sequence
  Description of Artificial Sequence: Synthetic peptide
  Seed: SIGKVCRTLLAKSVF
SILKVCRALLQKSVF

SEQ ID NO: 268423 - protein, 15 aa, Artificial Sequence
  Description of Artificial Sequence: Synthetic peptide
  Seed: SIGKVCRTLLAKSVF
SILKVCRALLRKSVF

SEQ ID NO: 268424 - protein, 15 aa, Artificial Sequence
  Description of Artificial Sequence: Synthetic peptide
  Seed: SIGKVCRTLLAKSVF
SILKVCRALLSKSVF

SEQ ID NO: 268425 - protein, 15 aa, Artificial Sequence
  Description of Artificial Sequence: Synthetic peptide
  Seed: SIGKVCRTLLAKSVF
SILKVCRALLYKSVF

SEQ ID NO: 268426 - protein, 15 aa, Artificial Sequence
  Description of Artificial Sequence: Synthetic peptide
  Seed: SIGKVCRTLLAKSVF
SILKVCRGLLAKSVF

SEQ ID NO: 268427 - protein, 15 aa, Artificial Sequence
  Description of Artificial Sequence: Synthetic peptide
  Seed: SIGKVCRTLLAKSVF
SILKVCRGLLGKSVF

SEQ ID NO: 268428 - protein, 15 aa, Artificial Sequence
  Description of Artificial Sequence: Synthetic peptide
  Seed: SIGKVCRTLLAKSVF
SILKVCRGLLKKSVF

SEQ ID NO: 268429 - protein, 15 aa, Artificial Sequence
  Description of Artificial Sequence: Synthetic peptide
  Seed: SIGKVCRTLLAKSVF
SILKVCRGLLRKSVF

SEQ ID NO: 268430 - protein, 15 aa, Artificial Sequence
  Description of Artificial Sequence: Synthetic peptide
  Seed: SIGKVCRTLLAKSVF
SILKVCRGLLSKSVF

SEQ ID NO: 268431 - protein, 15 aa, Artificial Sequence
  Description of Artificial Sequence: Synthetic peptide
  Seed: SIGKVCRTLLAKSVF
SILKVCRHLLAKSVF

SEQ ID NO: 268432 - protein, 15 aa, Artificial Sequence
  Description of Artificial Sequence: Synthetic peptide
  Seed: SIGKVCRTLLAKSVF
SILKVCRHLLGKSVF

SEQ ID NO: 268433 - protein, 15 aa, Artificial Sequence
  Description of Artificial Sequence: Synthetic peptide
  Seed: SIGKVCRTLLAKSVF
SILKVCRHLLHKSVF

SEQ ID NO: 268434 - protein, 15 aa, Artificial Sequence
  Description of Artificial Sequence: Synthetic peptide
  Seed: SIGKVCRTLLAKSVF
SILKVCRHLLKKSVF

SEQ ID NO: 268435 - protein, 15 aa, Artificial Sequence
  Description of Artificial Sequence: Synthetic peptide
  Seed: SIGKVCRTLLAKSVF
SILKVCRHLLNKSVF

SEQ ID NO: 268436 - protein, 15 aa, Artificial Sequence
  Description of Artificial Sequence: Synthetic peptide
  Seed: SIGKVCRTLLAKSVF
SILKVCRHLLQKSVF

SEQ ID NO: 268437 - protein, 15 aa, Artificial Sequence
  Description of Artificial Sequence: Synthetic peptide
  Seed: SIGKVCRTLLAKSVF
SILKVCRHLLRKSVF

SEQ ID NO: 268438 - protein, 15 aa, Artificial Sequence
  Description of Artificial Sequence: Synthetic peptide
  Seed: SIGKVCRTLLAKSVF
SILKVCRHLLSKSVF

SEQ ID NO: 268439 - protein, 15 aa, Artificial Sequence
  Description of Artificial Sequence: Synthetic peptide
  Seed: SIGKVCRTLLAKSVF
SILKVCRHLLTKSVF

SEQ ID NO: 268440 - protein, 15 aa, Artificial Sequence
  Description of Artificial Sequence: Synthetic peptide
  Seed: SIGKVCRTLLAKSVF
SILKVCRHLLVKSVF

SEQ ID NO: 268441 - protein, 15 aa, Artificial Sequence
  Description of Artificial Sequence: Synthetic peptide
  Seed: SIGKVCRTLLAKSVF
SILKVCRHLLYKSVF

SEQ ID NO: 268442 - protein, 15 aa, Artificial Sequence
  Description of Artificial Sequence: Synthetic peptide
  Seed: SIGKVCRTLLAKSVF
SILKVCRILLKKSVF

SEQ ID NO: 268443 - protein, 15 aa, Artificial Sequence
  Description of Artificial Sequence: Synthetic peptide
  Seed: SIGKVCRTLLAKSVF
SILKVCRILLRKSVF

SEQ ID NO: 268444 - protein, 15 aa, Artificial Sequence
  Description of Artificial Sequence: Synthetic peptide
  Seed: SIGKVCRTLLAKSVF
SILKVCRKLLAKSVF

SEQ ID NO: 268445 - protein, 15 aa, Artificial Sequence
  Description of Artificial Sequence: Synthetic peptide
  Seed: SIGKVCRTLLAKSVF
SILKVCRKLLCKSVF

SEQ ID NO: 268446 - protein, 15 aa, Artificial Sequence
  Description of Artificial Sequence: Synthetic peptide
  Seed: SIGKVCRTLLAKSVF
SILKVCRKLLDKSVF

SEQ ID NO: 268447 - protein, 15 aa, Artificial Sequence
  Description of Artificial Sequence: Synthetic peptide
  Seed: SIGKVCRTLLAKSVF
SILKVCRKLLEKSVF

SEQ ID NO: 268448 - protein, 15 aa, Artificial Sequence
  Description of Artificial Sequence: Synthetic peptide
  Seed: SIGKVCRTLLAKSVF
SILKVCRKLLFKSVF

SEQ ID NO: 268449 - protein, 15 aa, Artificial Sequence
  Description of Artificial Sequence: Synthetic peptide
  Seed: SIGKVCRTLLAKSVF
SILKVCRKLLGKSVF

SEQ ID NO: 268450 - protein, 15 aa, Artificial Sequence
  Description of Artificial Sequence: Synthetic peptide
  Seed: SIGKVCRTLLAKSVF
SILKVCRKLLHKSVF

SEQ ID NO: 268451 - protein, 15 aa, Artificial Sequence
  Description of Artificial Sequence: Synthetic peptide
  Seed: SIGKVCRTLLAKSVF
SILKVCRKLLIKSVF

SEQ ID NO: 268452 - protein, 15 aa, Artificial Sequence
  Description of Artificial Sequence: Synthetic peptide
  Seed: SIGKVCRTLLAKSVF
SILKVCRKLLKKSVF

SEQ ID NO: 268453 - protein, 15 aa, Artificial Sequence
  Description of Artificial Sequence: Synthetic peptide
  Seed: SIGKVCRTLLAKSVF
SILKVCRKLLLKSVF

SEQ ID NO: 268454 - protein, 15 aa, Artificial Sequence
  Description of Artificial Sequence: Synthetic peptide
  Seed: SIGKVCRTLLAKSVF
SILKVCRKLLMKSVF

SEQ ID NO: 268455 - protein, 15 aa, Artificial Sequence
  Description of Artificial Sequence: Synthetic peptide
  Seed: SIGKVCRTLLAKSVF
SILKVCRKLLNKSVF

SEQ ID NO: 268456 - protein, 15 aa, Artificial Sequence
  Description of Artificial Sequence: Synthetic peptide
  Seed: SIGKVCRTLLAKSVF
SILKVCRKLLPKSVF

SEQ ID NO: 268457 - protein, 15 aa, Artificial Sequence
  Description of Artificial Sequence: Synthetic peptide
  Seed: SIGKVCRTLLAKSVF
SILKVCRKLLQKSVF

SEQ ID NO: 268458 - protein, 15 aa, Artificial Sequence
  Description of Artificial Sequence: Synthetic peptide
  Seed: SIGKVCRTLLAKSVF
SILKVCRKLLRKSVF

SEQ ID NO: 268459 - protein, 15 aa, Artificial Sequence
  Description of Artificial Sequence: Synthetic peptide
  Seed: SIGKVCRTLLAKSVF
SILKVCRKLLSKSVF

SEQ ID NO: 268460 - protein, 15 aa, Artificial Sequence
  Description of Artificial Sequence: Synthetic peptide
  Seed: SIGKVCRTLLAKSVF
SILKVCRKLLTKSVF

SEQ ID NO: 268461 - protein, 15 aa, Artificial Sequence
  Description of Artificial Sequence: Synthetic peptide
  Seed: SIGKVCRTLLAKSVF
SILKVCRKLLVKSVF

SEQ ID NO: 268462 - protein, 15 aa, Artificial Sequence
  Description of Artificial Sequence: Synthetic peptide
  Seed: SIGKVCRTLLAKSVF
SILKVCRKLLWKSVF

SEQ ID NO: 268463 - protein, 15 aa, Artificial Sequence
  Description of Artificial Sequence: Synthetic peptide
  Seed: SIGKVCRTLLAKSVF
SILKVCRKLLYKSVF

SEQ ID NO: 268464 - protein, 15 aa, Artificial Sequence
  Description of Artificial Sequence: Synthetic peptide
  Seed: SIGKVCRTLLAKSVF
SILKVCRLLLRKSVF

SEQ ID NO: 268465 - protein, 15 aa, Artificial Sequence
  Description of Artificial Sequence: Synthetic peptide
  Seed: SIGKVCRTLLAKSVF
SILKVCRMLLRKSVF

SEQ ID NO: 268466 - protein, 15 aa, Artificial Sequence
  Description of Artificial Sequence: Synthetic peptide
  Seed: SIGKVCRTLLAKSVF
SILKVCRNLLAKSVF

SEQ ID NO: 268467 - protein, 15 aa, Artificial Sequence
  Description of Artificial Sequence: Synthetic peptide
  Seed: SIGKVCRTLLAKSVF
SILKVCRNLLGKSVF

SEQ ID NO: 268468 - protein, 15 aa, Artificial Sequence
  Description of Artificial Sequence: Synthetic peptide
  Seed: SIGKVCRTLLAKSVF
SILKVCRNLLHKSVF

SEQ ID NO: 268469 - protein, 15 aa, Artificial Sequence
  Description of Artificial Sequence: Synthetic peptide
  Seed: SIGKVCRTLLAKSVF
SILKVCRNLLKKSVF

SEQ ID NO: 268470 - protein, 15 aa, Artificial Sequence
  Description of Artificial Sequence: Synthetic peptide
  Seed: SIGKVCRTLLAKSVF
SILKVCRNLLQKSVF

SEQ ID NO: 268471 - protein, 15 aa, Artificial Sequence
  Description of Artificial Sequence: Synthetic peptide
  Seed: SIGKVCRTLLAKSVF
SILKVCRNLLRKSVF

SEQ ID NO: 268472 - protein, 15 aa, Artificial Sequence
  Description of Artificial Sequence: Synthetic peptide
  Seed: SIGKVCRTLLAKSVF
SILKVCRNLLSKSVF

SEQ ID NO: 268473 - protein, 15 aa, Artificial Sequence
  Description of Artificial Sequence: Synthetic peptide
  Seed: SIGKVCRTLLAKSVF
SILKVCRPLLAKSVF

SEQ ID NO: 268474 - protein, 15 aa, Artificial Sequence
  Description of Artificial Sequence: Synthetic peptide
  Seed: SIGKVCRTLLAKSVF
SILKVCRPLLGKSVF

SEQ ID NO: 268475 - protein, 15 aa, Artificial Sequence
  Description of Artificial Sequence: Synthetic peptide
  Seed: SIGKVCRTLLAKSVF
SILKVCRPLLHKSVF

SEQ ID NO: 268476 - protein, 15 aa, Artificial Sequence
  Description of Artificial Sequence: Synthetic peptide
  Seed: SIGKVCRTLLAKSVF
SILKVCRPLLKKSVF

SEQ ID NO: 268477 - protein, 15 aa, Artificial Sequence
  Description of Artificial Sequence: Synthetic peptide
  Seed: SIGKVCRTLLAKSVF
SILKVCRPLLQKSVF

SEQ ID NO: 268478 - protein, 15 aa, Artificial Sequence
  Description of Artificial Sequence: Synthetic peptide
  Seed: SIGKVCRTLLAKSVF
SILKVCRPLLRKSVF

SEQ ID NO: 268479 - protein, 15 aa, Artificial Sequence
  Description of Artificial Sequence: Synthetic peptide
  Seed: SIGKVCRTLLAKSVF
SILKVCRPLLSKSVF

SEQ ID NO: 268480 - protein, 15 aa, Artificial Sequence
  Description of Artificial Sequence: Synthetic peptide
  Seed: SIGKVCRTLLAKSVF
SILKVCRPLLYKSVF

SEQ ID NO: 268481 - protein, 15 aa, Artificial Sequence
  Description of Artificial Sequence: Synthetic peptide
  Seed: SIGKVCRTLLAKSVF
SILKVCRQLLAKSVF

SEQ ID NO: 268482 - protein, 15 aa, Artificial Sequence
  Description of Artificial Sequence: Synthetic peptide
  Seed: SIGKVCRTLLAKSVF
SILKVCRQLLKKSVF

SEQ ID NO: 268483 - protein, 15 aa, Artificial Sequence
  Description of Artificial Sequence: Synthetic peptide
  Seed: SIGKVCRTLLAKSVF
SILKVCRQLLRKSVF

SEQ ID NO: 268484 - protein, 15 aa, Artificial Sequence
  Description of Artificial Sequence: Synthetic peptide
  Seed: SIGKVCRTLLAKSVF
SILKVCRQLLSKSVF

SEQ ID NO: 268485 - protein, 15 aa, Artificial Sequence
  Description of Artificial Sequence: Synthetic peptide
  Seed: SIGKVCRTLLAKSVF
SILKVCRRLLAKSVF

SEQ ID NO: 268486 - protein, 15 aa, Artificial Sequence
  Description of Artificial Sequence: Synthetic peptide
  Seed: SIGKVCRTLLAKSVF
SILKVCRRLLCKSVF

SEQ ID NO: 268487 - protein, 15 aa, Artificial Sequence
  Description of Artificial Sequence: Synthetic peptide
  Seed: SIGKVCRTLLAKSVF
SILKVCRRLLDKSVF

SEQ ID NO: 268488 - protein, 15 aa, Artificial Sequence
  Description of Artificial Sequence: Synthetic peptide
  Seed: SIGKVCRTLLAKSVF
SILKVCRRLLEKSVF

SEQ ID NO: 268489 - protein, 15 aa, Artificial Sequence
  Description of Artificial Sequence: Synthetic peptide
  Seed: SIGKVCRTLLAKSVF
SILKVCRRLLFKSVF

SEQ ID NO: 268490 - protein, 15 aa, Artificial Sequence
  Description of Artificial Sequence: Synthetic peptide
  Seed: SIGKVCRTLLAKSVF
SILKVCRRLLGKSVF

SEQ ID NO: 268491 - protein, 15 aa, Artificial Sequence
  Description of Artificial Sequence: Synthetic peptide
  Seed: SIGKVCRTLLAKSVF
SILKVCRRLLHKSVF

SEQ ID NO: 268492 - protein, 15 aa, Artificial Sequence
  Description of Artificial Sequence: Synthetic peptide
  Seed: SIGKVCRTLLAKSVF
SILKVCRRLLIKSVF

SEQ ID NO: 268493 - protein, 15 aa, Artificial Sequence
  Description of Artificial Sequence: Synthetic peptide
  Seed: SIGKVCRTLLAKSVF
SILKVCRRLLKKSVF

SEQ ID NO: 268494 - protein, 15 aa, Artificial Sequence
  Description of Artificial Sequence: Synthetic peptide
  Seed: SIGKVCRTLLAKSVF
SILKVCRRLLLKSVF

SEQ ID NO: 268495 - protein, 15 aa, Artificial Sequence
  Description of Artificial Sequence: Synthetic peptide
  Seed: SIGKVCRTLLAKSVF
SILKVCRRLLMKSVF

SEQ ID NO: 268496 - protein, 15 aa, Artificial Sequence
  Description of Artificial Sequence: Synthetic peptide
  Seed: SIGKVCRTLLAKSVF
SILKVCRRLLNKSVF

SEQ ID NO: 268497 - protein, 15 aa, Artificial Sequence
  Description of Artificial Sequence: Synthetic peptide
  Seed: SIGKVCRTLLAKSVF
SILKVCRRLLPKSVF

SEQ ID NO: 268498 - protein, 15 aa, Artificial Sequence
  Description of Artificial Sequence: Synthetic peptide
  Seed: SIGKVCRTLLAKSVF
SILKVCRRLLQKSVF

SEQ ID NO: 268499 - protein, 15 aa, Artificial Sequence
  Description of Artificial Sequence: Synthetic peptide
  Seed: SIGKVCRTLLAKSVF
SILKVCRRLLRKSVF

SEQ ID NO: 268500 - protein, 15 aa, Artificial Sequence
  Description of Artificial Sequence: Synthetic peptide
  Seed: SIGKVCRTLLAKSVF
SILKVCRRLLSKSVF

SEQ ID NO: 268501 - protein, 15 aa, Artificial Sequence
  Description of Artificial Sequence: Synthetic peptide
  Seed: SIGKVCRTLLAKSVF
SILKVCRRLLTKSVF

SEQ ID NO: 268502 - protein, 15 aa, Artificial Sequence
  Description of Artificial Sequence: Synthetic peptide
  Seed: SIGKVCRTLLAKSVF
SILKVCRRLLVKSVF

SEQ ID NO: 268503 - protein, 15 aa, Artificial Sequence
  Description of Artificial Sequence: Synthetic peptide
  Seed: SIGKVCRTLLAKSVF
SILKVCRRLLWKSVF

SEQ ID NO: 268504 - protein, 15 aa, Artificial Sequence
  Description of Artificial Sequence: Synthetic peptide
  Seed: SIGKVCRTLLAKSVF
SILKVCRRLLYKSVF

SEQ ID NO: 268505 - protein, 15 aa, Artificial Sequence
  Description of Artificial Sequence: Synthetic peptide
  Seed: SIGKVCRTLLAKSVF
SILKVCRSLLAKSVF

SEQ ID NO: 268506 - protein, 15 aa, Artificial Sequence
  Description of Artificial Sequence: Synthetic peptide
  Seed: SIGKVCRTLLAKSVF
SILKVCRSLLGKSVF

SEQ ID NO: 268507 - protein, 15 aa, Artificial Sequence
  Description of Artificial Sequence: Synthetic peptide
  Seed: SIGKVCRTLLAKSVF
SILKVCRSLLHKSVF

SEQ ID NO: 268508 - protein, 15 aa, Artificial Sequence
  Description of Artificial Sequence: Synthetic peptide
  Seed: SIGKVCRTLLAKSVF
SILKVCRSLLKKSVF

SEQ ID NO: 268509 - protein, 15 aa, Artificial Sequence
  Description of Artificial Sequence: Synthetic peptide
  Seed: SIGKVCRTLLAKSVF
SILKVCRSLLQKSVF

SEQ ID NO: 268510 - protein, 15 aa, Artificial Sequence
  Description of Artificial Sequence: Synthetic peptide
  Seed: SIGKVCRTLLAKSVF
SILKVCRSLLRKSVF

SEQ ID NO: 268511 - protein, 15 aa, Artificial Sequence
  Description of Artificial Sequence: Synthetic peptide
  Seed: SIGKVCRTLLAKSVF
SILKVCRSLLSKSVF

SEQ ID NO: 268512 - protein, 15 aa, Artificial Sequence
  Description of Artificial Sequence: Synthetic peptide
  Seed: SIGKVCRTLLAKSVF
SILKVCRTLLAKSVF

SEQ ID NO: 268513 - protein, 15 aa, Artificial Sequence
  Description of Artificial Sequence: Synthetic peptide
  Seed: SIGKVCRTLLAKSVF
SILKVCRTLLGKSVF

SEQ ID NO: 268514 - protein, 15 aa, Artificial Sequence
  Description of Artificial Sequence: Synthetic peptide
  Seed: SIGKVCRTLLAKSVF
SILKVCRTLLHKSVF

SEQ ID NO: 268515 - protein, 15 aa, Artificial Sequence
  Description of Artificial Sequence: Synthetic peptide
  Seed: SIGKVCRTLLAKSVF
SILKVCRTLLKKSVF

SEQ ID NO: 268516 - protein, 15 aa, Artificial Sequence
  Description of Artificial Sequence: Synthetic peptide
  Seed: SIGKVCRTLLAKSVF
SILKVCRTLLQKSVF

SEQ ID NO: 268517 - protein, 15 aa, Artificial Sequence
  Description of Artificial Sequence: Synthetic peptide
  Seed: SIGKVCRTLLAKSVF
SILKVCRTLLRKSVF

SEQ ID NO: 268518 - protein, 15 aa, Artificial Sequence
  Description of Artificial Sequence: Synthetic peptide
  Seed: SIGKVCRTLLAKSVF
SILKVCRTLLSKSVF

SEQ ID NO: 268519 - protein, 15 aa, Artificial Sequence
  Description of Artificial Sequence: Synthetic peptide
  Seed: SIGKVCRTLLAKSVF
SILKVCRVLLHKSVF

SEQ ID NO: 268520 - protein, 15 aa, Artificial Sequence
  Description of Artificial Sequence: Synthetic peptide
  Seed: SIGKVCRTLLAKSVF
SILKVCRVLLKKSVF

SEQ ID NO: 268521 - protein, 15 aa, Artificial Sequence
  Description of Artificial Sequence: Synthetic peptide
  Seed: SIGKVCRTLLAKSVF
SILKVCRVLLRKSVF

SEQ ID NO: 268522 - protein, 15 aa, Artificial Sequence
  Description of Artificial Sequence: Synthetic peptide
  Seed: SIGKVCRTLLAKSVF
SILKVDRKLLAKSVF

SEQ ID NO: 268523 - protein, 15 aa, Artificial Sequence
  Description of Artificial Sequence: Synthetic peptide
  Seed: SIGKVCRTLLAKSVF
SILKVDRKLLGKSVF

SEQ ID NO: 268524 - protein, 15 aa, Artificial Sequence
  Description of Artificial Sequence: Synthetic peptide
  Seed: SIGKVCRTLLAKSVF
SILKVDRKLLHKSVF

SEQ ID NO: 268525 - protein, 15 aa, Artificial Sequence
  Description of Artificial Sequence: Synthetic peptide
  Seed: SIGKVCRTLLAKSVF
SILKVDRKLLKKSVF

SEQ ID NO: 268526 - protein, 15 aa, Artificial Sequence
  Description of Artificial Sequence: Synthetic peptide
  Seed: SIGKVCRTLLAKSVF
SILKVDRKLLQKSVF

SEQ ID NO: 268527 - protein, 15 aa, Artificial Sequence
  Description of Artificial Sequence: Synthetic peptide
  Seed: SIGKVCRTLLAKSVF
SILKVDRKLLRKSVF

SEQ ID NO: 268528 - protein, 15 aa, Artificial Sequence
  Description of Artificial Sequence: Synthetic peptide
  Seed: SIGKVCRTLLAKSVF
SILKVDRKLLSKSVF

SEQ ID NO: 268529 - protein, 15 aa, Artificial Sequence
  Description of Artificial Sequence: Synthetic peptide
  Seed: SIGKVCRTLLAKSVF
SILKVDRNLLAKSVF

SEQ ID NO: 268530 - protein, 15 aa, Artificial Sequence
  Description of Artificial Sequence: Synthetic peptide
  Seed: SIGKVCRTLLAKSVF
SILKVDRNLLSKSVF

SEQ ID NO: 268531 - protein, 15 aa, Artificial Sequence
  Description of Artificial Sequence: Synthetic peptide
  Seed: SIGKVCRTLLAKSVF
SILKVDRRLLAKSVF

SEQ ID NO: 268532 - protein, 15 aa, Artificial Sequence
  Description of Artificial Sequence: Synthetic peptide
  Seed: SIGKVCRTLLAKSVF
SILKVDRRLLFKSVF

SEQ ID NO: 268533 - protein, 15 aa, Artificial Sequence
  Description of Artificial Sequence: Synthetic peptide
  Seed: SIGKVCRTLLAKSVF
SILKVDRRLLGKSVF

SEQ ID NO: 268534 - protein, 15 aa, Artificial Sequence
  Description of Artificial Sequence: Synthetic peptide
  Seed: SIGKVCRTLLAKSVF
SILKVDRRLLHKSVF

SEQ ID NO: 268535 - protein, 15 aa, Artificial Sequence
  Description of Artificial Sequence: Synthetic peptide
  Seed: SIGKVCRTLLAKSVF
SILKVDRRLLIKSVF

SEQ ID NO: 268536 - protein, 15 aa, Artificial Sequence
  Description of Artificial Sequence: Synthetic peptide
  Seed: SIGKVCRTLLAKSVF
SILKVDRRLLKKSVF

SEQ ID NO: 268537 - protein, 15 aa, Artificial Sequence
  Description of Artificial Sequence: Synthetic peptide
  Seed: SIGKVCRTLLAKSVF
SILKVDRRLLLKSVF

SEQ ID NO: 268538 - protein, 15 aa, Artificial Sequence
  Description of Artificial Sequence: Synthetic peptide
  Seed: SIGKVCRTLLAKSVF
SILKVDRRLLMKSVF

SEQ ID NO: 268539 - protein, 15 aa, Artificial Sequence
  Description of Artificial Sequence: Synthetic peptide
  Seed: SIGKVCRTLLAKSVF
SILKVDRRLLNKSVF

SEQ ID NO: 268540 - protein, 15 aa, Artificial Sequence
  Description of Artificial Sequence: Synthetic peptide
  Seed: SIGKVCRTLLAKSVF
SILKVDRRLLPKSVF

SEQ ID NO: 268541 - protein, 15 aa, Artificial Sequence
  Description of Artificial Sequence: Synthetic peptide
  Seed: SIGKVCRTLLAKSVF
SILKVDRRLLQKSVF

SEQ ID NO: 268542 - protein, 15 aa, Artificial Sequence
  Description of Artificial Sequence: Synthetic peptide
  Seed: SIGKVCRTLLAKSVF
SILKVDRRLLRKSVF

SEQ ID NO: 268543 - protein, 15 aa, Artificial Sequence
  Description of Artificial Sequence: Synthetic peptide
  Seed: SIGKVCRTLLAKSVF
SILKVDRRLLSKSVF

SEQ ID NO: 268544 - protein, 15 aa, Artificial Sequence
  Description of Artificial Sequence: Synthetic peptide
  Seed: SIGKVCRTLLAKSVF
SILKVDRRLLTKSVF

SEQ ID NO: 268545 - protein, 15 aa, Artificial Sequence
  Description of Artificial Sequence: Synthetic peptide
  Seed: SIGKVCRTLLAKSVF
SILKVDRRLLVKSVF

SEQ ID NO: 268546 - protein, 15 aa, Artificial Sequence
  Description of Artificial Sequence: Synthetic peptide
  Seed: SIGKVCRTLLAKSVF
SILKVDRRLLYKSVF

SEQ ID NO: 268547 - protein, 15 aa, Artificial Sequence
  Description of Artificial Sequence: Synthetic peptide
  Seed: SIGKVCRTLLAKSVF
SILKVDRSLLAKSVF

SEQ ID NO: 268548 - protein, 15 aa, Artificial Sequence
  Description of Artificial Sequence: Synthetic peptide
  Seed: SIGKVCRTLLAKSVF
SILKVDRSLLSKSVF

SEQ ID NO: 268549 - protein, 15 aa, Artificial Sequence
  Description of Artificial Sequence: Synthetic peptide
  Seed: SIGKVCRTLLAKSVF
SILKVDRTLLAKSVF

SEQ ID NO: 268550 - protein, 15 aa, Artificial Sequence
  Description of Artificial Sequence: Synthetic peptide
  Seed: SIGKVCRTLLAKSVF
SILKVDRTLLSKSVF

SEQ ID NO: 268551 - protein, 15 aa, Artificial Sequence
  Description of Artificial Sequence: Synthetic peptide
  Seed: SIGKVCRTLLAKSVF
SILKVERALLAKSVF

SEQ ID NO: 268552 - protein, 15 aa, Artificial Sequence
  Description of Artificial Sequence: Synthetic peptide
  Seed: SIGKVCRTLLAKSVF
SILKVERALLQKSVF

SEQ ID NO: 268553 - protein, 15 aa, Artificial Sequence
  Description of Artificial Sequence: Synthetic peptide
  Seed: SIGKVCRTLLAKSVF
SILKVERALLRKSVF

SEQ ID NO: 268554 - protein, 15 aa, Artificial Sequence
  Description of Artificial Sequence: Synthetic peptide
  Seed: SIGKVCRTLLAKSVF
SILKVERALLSKSVF

SEQ ID NO: 268555 - protein, 15 aa, Artificial Sequence
  Description of Artificial Sequence: Synthetic peptide
  Seed: SIGKVCRTLLAKSVF
SILKVERHLLAKSVF

SEQ ID NO: 268556 - protein, 15 aa, Artificial Sequence
  Description of Artificial Sequence: Synthetic peptide
  Seed: SIGKVCRTLLAKSVF
SILKVERHLLRKSVF

SEQ ID NO: 268557 - protein, 15 aa, Artificial Sequence
  Description of Artificial Sequence: Synthetic peptide
  Seed: SIGKVCRTLLAKSVF
SILKVERHLLSKSVF

SEQ ID NO: 268558 - protein, 15 aa, Artificial Sequence
  Description of Artificial Sequence: Synthetic peptide
  Seed: SIGKVCRTLLAKSVF
SILKVERKLLAKSVF

SEQ ID NO: 268559 - protein, 15 aa, Artificial Sequence
  Description of Artificial Sequence: Synthetic peptide
  Seed: SIGKVCRTLLAKSVF
SILKVERKLLFKSVF

SEQ ID NO: 268560 - protein, 15 aa, Artificial Sequence
  Description of Artificial Sequence: Synthetic peptide
  Seed: SIGKVCRTLLAKSVF
SILKVERKLLGKSVF

SEQ ID NO: 268561 - protein, 15 aa, Artificial Sequence
  Description of Artificial Sequence: Synthetic peptide
  Seed: SIGKVCRTLLAKSVF
SILKVERKLLHKSVF

SEQ ID NO: 268562 - protein, 15 aa, Artificial Sequence
  Description of Artificial Sequence: Synthetic peptide
  Seed: SIGKVCRTLLAKSVF
SILKVERKLLIKSVF

SEQ ID NO: 268563 - protein, 15 aa, Artificial Sequence
  Description of Artificial Sequence: Synthetic peptide
  Seed: SIGKVCRTLLAKSVF
SILKVERKLLKKSVF

SEQ ID NO: 268564 - protein, 15 aa, Artificial Sequence
  Description of Artificial Sequence: Synthetic peptide
  Seed: SIGKVCRTLLAKSVF
SILKVERKLLLKSVF

SEQ ID NO: 268565 - protein, 15 aa, Artificial Sequence
  Description of Artificial Sequence: Synthetic peptide
  Seed: SIGKVCRTLLAKSVF
SILKVERKLLMKSVF

SEQ ID NO: 268566 - protein, 15 aa, Artificial Sequence
  Description of Artificial Sequence: Synthetic peptide
  Seed: SIGKVCRTLLAKSVF
SILKVERKLLNKSVF

SEQ ID NO: 268567 - protein, 15 aa, Artificial Sequence
  Description of Artificial Sequence: Synthetic peptide
  Seed: SIGKVCRTLLAKSVF
SILKVERKLLPKSVF

SEQ ID NO: 268568 - protein, 15 aa, Artificial Sequence
  Description of Artificial Sequence: Synthetic peptide
  Seed: SIGKVCRTLLAKSVF
SILKVERKLLQKSVF

SEQ ID NO: 268569 - protein, 15 aa, Artificial Sequence
  Description of Artificial Sequence: Synthetic peptide
  Seed: SIGKVCRTLLAKSVF
SILKVERKLLRKSVF

SEQ ID NO: 268570 - protein, 15 aa, Artificial Sequence
  Description of Artificial Sequence: Synthetic peptide
  Seed: SIGKVCRTLLAKSVF
SILKVERKLLSKSVF

SEQ ID NO: 268571 - protein, 15 aa, Artificial Sequence
  Description of Artificial Sequence: Synthetic peptide
  Seed: SIGKVCRTLLAKSVF
SILKVERKLLTKSVF

SEQ ID NO: 268572 - protein, 15 aa, Artificial Sequence
  Description of Artificial Sequence: Synthetic peptide
  Seed: SIGKVCRTLLAKSVF
SILKVERKLLVKSVF

SEQ ID NO: 268573 - protein, 15 aa, Artificial Sequence
  Description of Artificial Sequence: Synthetic peptide
  Seed: SIGKVCRTLLAKSVF
SILKVERKLLYKSVF

SEQ ID NO: 268574 - protein, 15 aa, Artificial Sequence
  Description of Artificial Sequence: Synthetic peptide
  Seed: SIGKVCRTLLAKSVF
SILKVERNLLAKSVF

SEQ ID NO: 268575 - protein, 15 aa, Artificial Sequence
  Description of Artificial Sequence: Synthetic peptide
  Seed: SIGKVCRTLLAKSVF
SILKVERNLLSKSVF

SEQ ID NO: 268576 - protein, 15 aa, Artificial Sequence
  Description of Artificial Sequence: Synthetic peptide
  Seed: SIGKVCRTLLAKSVF
SILKVERRLLAKSVF

SEQ ID NO: 268577 - protein, 15 aa, Artificial Sequence
  Description of Artificial Sequence: Synthetic peptide
  Seed: SIGKVCRTLLAKSVF
SILKVERRLLCKSVF

SEQ ID NO: 268578 - protein, 15 aa, Artificial Sequence
  Description of Artificial Sequence: Synthetic peptide
  Seed: SIGKVCRTLLAKSVF
SILKVERRLLDKSVF

SEQ ID NO: 268579 - protein, 15 aa, Artificial Sequence
  Description of Artificial Sequence: Synthetic peptide
  Seed: SIGKVCRTLLAKSVF
SILKVERRLLEKSVF

SEQ ID NO: 268580 - protein, 15 aa, Artificial Sequence
  Description of Artificial Sequence: Synthetic peptide
  Seed: SIGKVCRTLLAKSVF
SILKVERRLLFKSVF

SEQ ID NO: 268581 - protein, 15 aa, Artificial Sequence
  Description of Artificial Sequence: Synthetic peptide
  Seed: SIGKVCRTLLAKSVF
SILKVERRLLGKSVF

SEQ ID NO: 268582 - protein, 15 aa, Artificial Sequence
  Description of Artificial Sequence: Synthetic peptide
  Seed: SIGKVCRTLLAKSVF
SILKVERRLLHKSVF

SEQ ID NO: 268583 - protein, 15 aa, Artificial Sequence
  Description of Artificial Sequence: Synthetic peptide
  Seed: SIGKVCRTLLAKSVF
SILKVERRLLIKSVF

SEQ ID NO: 268584 - protein, 15 aa, Artificial Sequence
  Description of Artificial Sequence: Synthetic peptide
  Seed: SIGKVCRTLLAKSVF
SILKVERRLLKKSVF

SEQ ID NO: 268585 - protein, 15 aa, Artificial Sequence
  Description of Artificial Sequence: Synthetic peptide
  Seed: SIGKVCRTLLAKSVF
SILKVERRLLLKSVF

SEQ ID NO: 268586 - protein, 15 aa, Artificial Sequence
  Description of Artificial Sequence: Synthetic peptide
  Seed: SIGKVCRTLLAKSVF
SILKVERRLLMKSVF

SEQ ID NO: 268587 - protein, 15 aa, Artificial Sequence
  Description of Artificial Sequence: Synthetic peptide
  Seed: SIGKVCRTLLAKSVF
SILKVERRLLNKSVF

SEQ ID NO: 268588 - protein, 15 aa, Artificial Sequence
  Description of Artificial Sequence: Synthetic peptide
  Seed: SIGKVCRTLLAKSVF
SILKVERRLLPKSVF

SEQ ID NO: 268589 - protein, 15 aa, Artificial Sequence
  Description of Artificial Sequence: Synthetic peptide
  Seed: SIGKVCRTLLAKSVF
SILKVERRLLQKSVF

SEQ ID NO: 268590 - protein, 15 aa, Artificial Sequence
  Description of Artificial Sequence: Synthetic peptide
  Seed: SIGKVCRTLLAKSVF
SILKVERRLLRKSVF

SEQ ID NO: 268591 - protein, 15 aa, Artificial Sequence
  Description of Artificial Sequence: Synthetic peptide
  Seed: SIGKVCRTLLAKSVF
SILKVERRLLSKSVF

SEQ ID NO: 268592 - protein, 15 aa, Artificial Sequence
  Description of Artificial Sequence: Synthetic peptide
  Seed: SIGKVCRTLLAKSVF
SILKVERRLLTKSVF

SEQ ID NO: 268593 - protein, 15 aa, Artificial Sequence
  Description of Artificial Sequence: Synthetic peptide
  Seed: SIGKVCRTLLAKSVF
SILKVERRLLVKSVF

SEQ ID NO: 268594 - protein, 15 aa, Artificial Sequence
  Description of Artificial Sequence: Synthetic peptide
  Seed: SIGKVCRTLLAKSVF
SILKVERRLLWKSVF

SEQ ID NO: 268595 - protein, 15 aa, Artificial Sequence
  Description of Artificial Sequence: Synthetic peptide
  Seed: SIGKVCRTLLAKSVF
SILKVERRLLYKSVF

SEQ ID NO: 268596 - protein, 15 aa, Artificial Sequence
  Description of Artificial Sequence: Synthetic peptide
  Seed: SIGKVCRTLLAKSVF
SILKVERSLLAKSVF

SEQ ID NO: 268597 - protein, 15 aa, Artificial Sequence
  Description of Artificial Sequence: Synthetic peptide
  Seed: SIGKVCRTLLAKSVF
SILKVERSLLKKSVF

SEQ ID NO: 268598 - protein, 15 aa, Artificial Sequence
  Description of Artificial Sequence: Synthetic peptide
  Seed: SIGKVCRTLLAKSVF
SILKVERSLLRKSVF

SEQ ID NO: 268599 - protein, 15 aa, Artificial Sequence
  Description of Artificial Sequence: Synthetic peptide
  Seed: SIGKVCRTLLAKSVF
SILKVERTLLAKSVF

SEQ ID NO: 268600 - protein, 15 aa, Artificial Sequence
  Description of Artificial Sequence: Synthetic peptide
  Seed: SIGKVCRTLLAKSVF
SILKVERTLLKKSVF

SEQ ID NO: 268601 - protein, 15 aa, Artificial Sequence
  Description of Artificial Sequence: Synthetic peptide
  Seed: SIGKVCRTLLAKSVF
SILKVERTLLRKSVF

SEQ ID NO: 268602 - protein, 15 aa, Artificial Sequence
  Description of Artificial Sequence: Synthetic peptide
  Seed: SIGKVCRTLLAKSVF
SILKVERTLLSKSVF

SEQ ID NO: 268603 - protein, 15 aa, Artificial Sequence
  Description of Artificial Sequence: Synthetic peptide
  Seed: SIGKVCRTLLAKSVF
SILKVERVLLRKSVF

SEQ ID NO: 268604 - protein, 15 aa, Artificial Sequence
  Description of Artificial Sequence: Synthetic peptide
  Seed: SIGKVCRTLLAKSVF
SILKVFRALLAKSVF

SEQ ID NO: 268605 - protein, 15 aa, Artificial Sequence
  Description of Artificial Sequence: Synthetic peptide
  Seed: SIGKVCRTLLAKSVF
SILKVFRALLGKSVF

SEQ ID NO: 268606 - protein, 15 aa, Artificial Sequence
  Description of Artificial Sequence: Synthetic peptide
  Seed: SIGKVCRTLLAKSVF
SILKVFRALLHKSVF

SEQ ID NO: 268607 - protein, 15 aa, Artificial Sequence
  Description of Artificial Sequence: Synthetic peptide
  Seed: SIGKVCRTLLAKSVF
SILKVFRALLQKSVF

SEQ ID NO: 268608 - protein, 15 aa, Artificial Sequence
  Description of Artificial Sequence: Synthetic peptide
  Seed: SIGKVCRTLLAKSVF
SILKVFRALLSKSVF

SEQ ID NO: 268609 - protein, 15 aa, Artificial Sequence
  Description of Artificial Sequence: Synthetic peptide
  Seed: SIGKVCRTLLAKSVF
SILKVFRALLTKSVF

SEQ ID NO: 268610 - protein, 15 aa, Artificial Sequence
  Description of Artificial Sequence: Synthetic peptide
  Seed: SIGKVCRTLLAKSVF
SILKVFRELLRKSVF

SEQ ID NO: 268611 - protein, 15 aa, Artificial Sequence
  Description of Artificial Sequence: Synthetic peptide
  Seed: SIGKVCRTLLAKSVF
SILKVFRGLLAKSVF

SEQ ID NO: 268612 - protein, 15 aa, Artificial Sequence
  Description of Artificial Sequence: Synthetic peptide
  Seed: SIGKVCRTLLAKSVF
SILKVFRGLLGKSVF

SEQ ID NO: 268613 - protein, 15 aa, Artificial Sequence
  Description of Artificial Sequence: Synthetic peptide
  Seed: SIGKVCRTLLAKSVF
SILKVFRGLLHKSVF

SEQ ID NO: 268614 - protein, 15 aa, Artificial Sequence
  Description of Artificial Sequence: Synthetic peptide
  Seed: SIGKVCRTLLAKSVF
SILKVFRGLLQKSVF

SEQ ID NO: 268615 - protein, 15 aa, Artificial Sequence
  Description of Artificial Sequence: Synthetic peptide
  Seed: SIGKVCRTLLAKSVF
SILKVFRGLLSKSVF

SEQ ID NO: 268616 - protein, 15 aa, Artificial Sequence
  Description of Artificial Sequence: Synthetic peptide
  Seed: SIGKVCRTLLAKSVF
SILKVFRHLLAKSVF

SEQ ID NO: 268617 - protein, 15 aa, Artificial Sequence
  Description of Artificial Sequence: Synthetic peptide
  Seed: SIGKVCRTLLAKSVF
SILKVFRHLLGKSVF

SEQ ID NO: 268618 - protein, 15 aa, Artificial Sequence
  Description of Artificial Sequence: Synthetic peptide
  Seed: SIGKVCRTLLAKSVF
SILKVFRHLLHKSVF

SEQ ID NO: 268619 - protein, 15 aa, Artificial Sequence
  Description of Artificial Sequence: Synthetic peptide
  Seed: SIGKVCRTLLAKSVF
SILKVFRHLLIKSVF

SEQ ID NO: 268620 - protein, 15 aa, Artificial Sequence
  Description of Artificial Sequence: Synthetic peptide
  Seed: SIGKVCRTLLAKSVF
SILKVFRHLLKKSVF

SEQ ID NO: 268621 - protein, 15 aa, Artificial Sequence
  Description of Artificial Sequence: Synthetic peptide
  Seed: SIGKVCRTLLAKSVF
SILKVFRHLLMKSVF

SEQ ID NO: 268622 - protein, 15 aa, Artificial Sequence
  Description of Artificial Sequence: Synthetic peptide
  Seed: SIGKVCRTLLAKSVF
SILKVFRHLLNKSVF

SEQ ID NO: 268623 - protein, 15 aa, Artificial Sequence
  Description of Artificial Sequence: Synthetic peptide
  Seed: SIGKVCRTLLAKSVF
SILKVFRHLLPKSVF

SEQ ID NO: 268624 - protein, 15 aa, Artificial Sequence
  Description of Artificial Sequence: Synthetic peptide
  Seed: SIGKVCRTLLAKSVF
SILKVFRHLLQKSVF

SEQ ID NO: 268625 - protein, 15 aa, Artificial Sequence
  Description of Artificial Sequence: Synthetic peptide
  Seed: SIGKVCRTLLAKSVF
SILKVFRHLLRKSVF

SEQ ID NO: 268626 - protein, 15 aa, Artificial Sequence
  Description of Artificial Sequence: Synthetic peptide
  Seed: SIGKVCRTLLAKSVF
SILKVFRHLLSKSVF

SEQ ID NO: 268627 - protein, 15 aa, Artificial Sequence
  Description of Artificial Sequence: Synthetic peptide
  Seed: SIGKVCRTLLAKSVF
SILKVFRHLLTKSVF

SEQ ID NO: 268628 - protein, 15 aa, Artificial Sequence
  Description of Artificial Sequence: Synthetic peptide
  Seed: SIGKVCRTLLAKSVF
SILKVFRHLLVKSVF

SEQ ID NO: 268629 - protein, 15 aa, Artificial Sequence
  Description of Artificial Sequence: Synthetic peptide
  Seed: SIGKVCRTLLAKSVF
SILKVFRHLLYKSVF

SEQ ID NO: 268630 - protein, 15 aa, Artificial Sequence
  Description of Artificial Sequence: Synthetic peptide
  Seed: SIGKVCRTLLAKSVF
SILKVFRKLLAKSVF

SEQ ID NO: 268631 - protein, 15 aa, Artificial Sequence
  Description of Artificial Sequence: Synthetic peptide
  Seed: SIGKVCRTLLAKSVF
SILKVFRKLLCKSVF

SEQ ID NO: 268632 - protein, 15 aa, Artificial Sequence
  Description of Artificial Sequence: Synthetic peptide
  Seed: SIGKVCRTLLAKSVF
SILKVFRKLLDKSVF

SEQ ID NO: 268633 - protein, 15 aa, Artificial Sequence
  Description of Artificial Sequence: Synthetic peptide
  Seed: SIGKVCRTLLAKSVF
SILKVFRKLLEKSVF

SEQ ID NO: 268634 - protein, 15 aa, Artificial Sequence
  Description of Artificial Sequence: Synthetic peptide
  Seed: SIGKVCRTLLAKSVF
SILKVFRKLLFKSVF

SEQ ID NO: 268635 - protein, 15 aa, Artificial Sequence
  Description of Artificial Sequence: Synthetic peptide
  Seed: SIGKVCRTLLAKSVF
SILKVFRKLLGKSVF

SEQ ID NO: 268636 - protein, 15 aa, Artificial Sequence
  Description of Artificial Sequence: Synthetic peptide
  Seed: SIGKVCRTLLAKSVF
SILKVFRKLLHKSVF

SEQ ID NO: 268637 - protein, 15 aa, Artificial Sequence
  Description of Artificial Sequence: Synthetic peptide
  Seed: SIGKVCRTLLAKSVF
SILKVFRKLLIKSVF

SEQ ID NO: 268638 - protein, 15 aa, Artificial Sequence
  Description of Artificial Sequence: Synthetic peptide
  Seed: SIGKVCRTLLAKSVF
SILKVFRKLLKKSVF

SEQ ID NO: 268639 - protein, 15 aa, Artificial Sequence
  Description of Artificial Sequence: Synthetic peptide
  Seed: SIGKVCRTLLAKSVF
SILKVFRKLLLKSVF

SEQ ID NO: 268640 - protein, 15 aa, Artificial Sequence
  Description of Artificial Sequence: Synthetic peptide
  Seed: SIGKVCRTLLAKSVF
SILKVFRKLLMKSVF

SEQ ID NO: 268641 - protein, 15 aa, Artificial Sequence
  Description of Artificial Sequence: Synthetic peptide
  Seed: SIGKVCRTLLAKSVF
SILKVFRKLLNKSVF

SEQ ID NO: 268642 - protein, 15 aa, Artificial Sequence
  Description of Artificial Sequence: Synthetic peptide
  Seed: SIGKVCRTLLAKSVF
SILKVFRKLLPKSVF

SEQ ID NO: 268643 - protein, 15 aa, Artificial Sequence
  Description of Artificial Sequence: Synthetic peptide
  Seed: SIGKVCRTLLAKSVF
SILKVFRKLLQKSVF

SEQ ID NO: 268644 - protein, 15 aa, Artificial Sequence
  Description of Artificial Sequence: Synthetic peptide
  Seed: SIGKVCRTLLAKSVF
SILKVFRKLLRKSVF

SEQ ID NO: 268645 - protein, 15 aa, Artificial Sequence
  Description of Artificial Sequence: Synthetic peptide
  Seed: SIGKVCRTLLAKSVF
SILKVFRKLLSKSVF

SEQ ID NO: 268646 - protein, 15 aa, Artificial Sequence
  Description of Artificial Sequence: Synthetic peptide
  Seed: SIGKVCRTLLAKSVF
SILKVFRKLLTKSVF

SEQ ID NO: 268647 - protein, 15 aa, Artificial Sequence
  Description of Artificial Sequence: Synthetic peptide
  Seed: SIGKVCRTLLAKSVF
SILKVFRKLLVKSVF

SEQ ID NO: 268648 - protein, 15 aa, Artificial Sequence
  Description of Artificial Sequence: Synthetic peptide
  Seed: SIGKVCRTLLAKSVF
SILKVFRKLLWKSVF

SEQ ID NO: 268649 - protein, 15 aa, Artificial Sequence
  Description of Artificial Sequence: Synthetic peptide
  Seed: SIGKVCRTLLAKSVF
SILKVFRKLLYKSVF

SEQ ID NO: 268650 - protein, 15 aa, Artificial Sequence
  Description of Artificial Sequence: Synthetic peptide
  Seed: SIGKVCRTLLAKSVF
SILKVFRNLLAKSVF

SEQ ID NO: 268651 - protein, 15 aa, Artificial Sequence
  Description of Artificial Sequence: Synthetic peptide
  Seed: SIGKVCRTLLAKSVF
SILKVFRNLLDKSVF

SEQ ID NO: 268652 - protein, 15 aa, Artificial Sequence
  Description of Artificial Sequence: Synthetic peptide
  Seed: SIGKVCRTLLAKSVF
SILKVFRNLLGKSVF

SEQ ID NO: 268653 - protein, 15 aa, Artificial Sequence
  Description of Artificial Sequence: Synthetic peptide
  Seed: SIGKVCRTLLAKSVF
SILKVFRNLLHKSVF

SEQ ID NO: 268654 - protein, 15 aa, Artificial Sequence
  Description of Artificial Sequence: Synthetic peptide
  Seed: SIGKVCRTLLAKSVF
SILKVFRNLLQKSVF

SEQ ID NO: 268655 - protein, 15 aa, Artificial Sequence
  Description of Artificial Sequence: Synthetic peptide
  Seed: SIGKVCRTLLAKSVF
SILKVFRNLLRKSVF

SEQ ID NO: 268656 - protein, 15 aa, Artificial Sequence
  Description of Artificial Sequence: Synthetic peptide
  Seed: SIGKVCRTLLAKSVF
SILKVFRNLLSKSVF

SEQ ID NO: 268657 - protein, 15 aa, Artificial Sequence
  Description of Artificial Sequence: Synthetic peptide
  Seed: SIGKVCRTLLAKSVF
SILKVFRNLLTKSVF

SEQ ID NO: 268658 - protein, 15 aa, Artificial Sequence
  Description of Artificial Sequence: Synthetic peptide
  Seed: SIGKVCRTLLAKSVF
SILKVFRPLLAKSVF

SEQ ID NO: 268659 - protein, 15 aa, Artificial Sequence
  Description of Artificial Sequence: Synthetic peptide
  Seed: SIGKVCRTLLAKSVF
SILKVFRPLLGKSVF

SEQ ID NO: 268660 - protein, 15 aa, Artificial Sequence
  Description of Artificial Sequence: Synthetic peptide
  Seed: SIGKVCRTLLAKSVF
SILKVFRPLLHKSVF

SEQ ID NO: 268661 - protein, 15 aa, Artificial Sequence
  Description of Artificial Sequence: Synthetic peptide
  Seed: SIGKVCRTLLAKSVF
SILKVFRPLLMKSVF

SEQ ID NO: 268662 - protein, 15 aa, Artificial Sequence
  Description of Artificial Sequence: Synthetic peptide
  Seed: SIGKVCRTLLAKSVF
SILKVFRPLLNKSVF

SEQ ID NO: 268663 - protein, 15 aa, Artificial Sequence
  Description of Artificial Sequence: Synthetic peptide
  Seed: SIGKVCRTLLAKSVF
SILKVFRPLLQKSVF

SEQ ID NO: 268664 - protein, 15 aa, Artificial Sequence
  Description of Artificial Sequence: Synthetic peptide
  Seed: SIGKVCRTLLAKSVF
SILKVFRPLLSKSVF

SEQ ID NO: 268665 - protein, 15 aa, Artificial Sequence
  Description of Artificial Sequence: Synthetic peptide
  Seed: SIGKVCRTLLAKSVF
SILKVFRPLLTKSVF

SEQ ID NO: 268666 - protein, 15 aa, Artificial Sequence
  Description of Artificial Sequence: Synthetic peptide
  Seed: SIGKVCRTLLAKSVF
SILKVFRPLLVKSVF

SEQ ID NO: 268667 - protein, 15 aa, Artificial Sequence
  Description of Artificial Sequence: Synthetic peptide
  Seed: SIGKVCRTLLAKSVF
SILKVFRPLLYKSVF

SEQ ID NO: 268668 - protein, 15 aa, Artificial Sequence
  Description of Artificial Sequence: Synthetic peptide
  Seed: SIGKVCRTLLAKSVF
SILKVFRQLLHKSVF

SEQ ID NO: 268669 - protein, 15 aa, Artificial Sequence
  Description of Artificial Sequence: Synthetic peptide
  Seed: SIGKVCRTLLAKSVF
SILKVFRQLLRKSVF

SEQ ID NO: 268670 - protein, 15 aa, Artificial Sequence
  Description of Artificial Sequence: Synthetic peptide
  Seed: SIGKVCRTLLAKSVF
SILKVFRQLLSKSVF

SEQ ID NO: 268671 - protein, 15 aa, Artificial Sequence
  Description of Artificial Sequence: Synthetic peptide
  Seed: SIGKVCRTLLAKSVF
SILKVFRRLLAKSVF

SEQ ID NO: 268672 - protein, 15 aa, Artificial Sequence
  Description of Artificial Sequence: Synthetic peptide
  Seed: SIGKVCRTLLAKSVF
SILKVFRRLLCKSVF

SEQ ID NO: 268673 - protein, 15 aa, Artificial Sequence
  Description of Artificial Sequence: Synthetic peptide
  Seed: SIGKVCRTLLAKSVF
SILKVFRRLLDKSVF

SEQ ID NO: 268674 - protein, 15 aa, Artificial Sequence
  Description of Artificial Sequence: Synthetic peptide
  Seed: SIGKVCRTLLAKSVF
SILKVFRRLLEKSVF

SEQ ID NO: 268675 - protein, 15 aa, Artificial Sequence
  Description of Artificial Sequence: Synthetic peptide
  Seed: SIGKVCRTLLAKSVF
SILKVFRRLLFKSVF

SEQ ID NO: 268676 - protein, 15 aa, Artificial Sequence
  Description of Artificial Sequence: Synthetic peptide
  Seed: SIGKVCRTLLAKSVF
SILKVFRRLLGKSVF

SEQ ID NO: 268677 - protein, 15 aa, Artificial Sequence
  Description of Artificial Sequence: Synthetic peptide
  Seed: SIGKVCRTLLAKSVF
SILKVFRRLLHKSVF

SEQ ID NO: 268678 - protein, 15 aa, Artificial Sequence
  Description of Artificial Sequence: Synthetic peptide
  Seed: SIGKVCRTLLAKSVF
SILKVFRRLLIKSVF

SEQ ID NO: 268679 - protein, 15 aa, Artificial Sequence
  Description of Artificial Sequence: Synthetic peptide
  Seed: SIGKVCRTLLAKSVF
SILKVFRRLLKKSVF

SEQ ID NO: 268680 - protein, 15 aa, Artificial Sequence
  Description of Artificial Sequence: Synthetic peptide
  Seed: SIGKVCRTLLAKSVF
SILKVFRRLLLKSVF

SEQ ID NO: 268681 - protein, 15 aa, Artificial Sequence
  Description of Artificial Sequence: Synthetic peptide
  Seed: SIGKVCRTLLAKSVF
SILKVFRRLLMKSVF

SEQ ID NO: 268682 - protein, 15 aa, Artificial Sequence
  Description of Artificial Sequence: Synthetic peptide
  Seed: SIGKVCRTLLAKSVF
SILKVFRRLLNKSVF

SEQ ID NO: 268683 - protein, 15 aa, Artificial Sequence
  Description of Artificial Sequence: Synthetic peptide
  Seed: SIGKVCRTLLAKSVF
SILKVFRRLLPKSVF

SEQ ID NO: 268684 - protein, 15 aa, Artificial Sequence
  Description of Artificial Sequence: Synthetic peptide
  Seed: SIGKVCRTLLAKSVF
SILKVFRRLLQKSVF

SEQ ID NO: 268685 - protein, 15 aa, Artificial Sequence
  Description of Artificial Sequence: Synthetic peptide
  Seed: SIGKVCRTLLAKSVF
SILKVFRRLLRKSVF

SEQ ID NO: 268686 - protein, 15 aa, Artificial Sequence
  Description of Artificial Sequence: Synthetic peptide
  Seed: SIGKVCRTLLAKSVF
SILKVFRRLLSKSVF

SEQ ID NO: 268687 - protein, 15 aa, Artificial Sequence
  Description of Artificial Sequence: Synthetic peptide
  Seed: SIGKVCRTLLAKSVF
SILKVFRRLLTKSVF

SEQ ID NO: 268688 - protein, 15 aa, Artificial Sequence
  Description of Artificial Sequence: Synthetic peptide
  Seed: SIGKVCRTLLAKSVF
SILKVFRRLLVKSVF

SEQ ID NO: 268689 - protein, 15 aa, Artificial Sequence
  Description of Artificial Sequence: Synthetic peptide
  Seed: SIGKVCRTLLAKSVF
SILKVFRRLLWKSVF

SEQ ID NO: 268690 - protein, 15 aa, Artificial Sequence
  Description of Artificial Sequence: Synthetic peptide
  Seed: SIGKVCRTLLAKSVF
SILKVFRRLLYKSVF

SEQ ID NO: 268691 - protein, 15 aa, Artificial Sequence
  Description of Artificial Sequence: Synthetic peptide
  Seed: SIGKVCRTLLAKSVF
SILKVFRSLLAKSVF

SEQ ID NO: 268692 - protein, 15 aa, Artificial Sequence
  Description of Artificial Sequence: Synthetic peptide
  Seed: SIGKVCRTLLAKSVF
SILKVFRSLLDKSVF

SEQ ID NO: 268693 - protein, 15 aa, Artificial Sequence
  Description of Artificial Sequence: Synthetic peptide
  Seed: SIGKVCRTLLAKSVF
SILKVFRSLLEKSVF

SEQ ID NO: 268694 - protein, 15 aa, Artificial Sequence
  Description of Artificial Sequence: Synthetic peptide
  Seed: SIGKVCRTLLAKSVF
SILKVFRSLLGKSVF

SEQ ID NO: 268695 - protein, 15 aa, Artificial Sequence
  Description of Artificial Sequence: Synthetic peptide
  Seed: SIGKVCRTLLAKSVF
SILKVFRSLLHKSVF

SEQ ID NO: 268696 - protein, 15 aa, Artificial Sequence
  Description of Artificial Sequence: Synthetic peptide
  Seed: SIGKVCRTLLAKSVF
SILKVFRSLLKKSVF

SEQ ID NO: 268697 - protein, 15 aa, Artificial Sequence
  Description of Artificial Sequence: Synthetic peptide
  Seed: SIGKVCRTLLAKSVF
SILKVFRSLLNKSVF

SEQ ID NO: 268698 - protein, 15 aa, Artificial Sequence
  Description of Artificial Sequence: Synthetic peptide
  Seed: SIGKVCRTLLAKSVF
SILKVFRSLLQKSVF

SEQ ID NO: 268699 - protein, 15 aa, Artificial Sequence
  Description of Artificial Sequence: Synthetic peptide
  Seed: SIGKVCRTLLAKSVF
SILKVFRSLLRKSVF

SEQ ID NO: 268700 - protein, 15 aa, Artificial Sequence
  Description of Artificial Sequence: Synthetic peptide
  Seed: SIGKVCRTLLAKSVF
SILKVFRSLLSKSVF

SEQ ID NO: 268701 - protein, 15 aa, Artificial Sequence
  Description of Artificial Sequence: Synthetic peptide
  Seed: SIGKVCRTLLAKSVF
SILKVFRSLLTKSVF

SEQ ID NO: 268702 - protein, 15 aa, Artificial Sequence
  Description of Artificial Sequence: Synthetic peptide
  Seed: SIGKVCRTLLAKSVF
SILKVFRTLLAKSVF

SEQ ID NO: 268703 - protein, 15 aa, Artificial Sequence
  Description of Artificial Sequence: Synthetic peptide
  Seed: SIGKVCRTLLAKSVF
SILKVFRTLLDKSVF

SEQ ID NO: 268704 - protein, 15 aa, Artificial Sequence
  Description of Artificial Sequence: Synthetic peptide
  Seed: SIGKVCRTLLAKSVF
SILKVFRTLLEKSVF

SEQ ID NO: 268705 - protein, 15 aa, Artificial Sequence
  Description of Artificial Sequence: Synthetic peptide
  Seed: SIGKVCRTLLAKSVF
SILKVFRTLLGKSVF

SEQ ID NO: 268706 - protein, 15 aa, Artificial Sequence
  Description of Artificial Sequence: Synthetic peptide
  Seed: SIGKVCRTLLAKSVF
SILKVFRTLLHKSVF

SEQ ID NO: 268707 - protein, 15 aa, Artificial Sequence
  Description of Artificial Sequence: Synthetic peptide
  Seed: SIGKVCRTLLAKSVF
SILKVFRTLLKKSVF

SEQ ID NO: 268708 - protein, 15 aa, Artificial Sequence
  Description of Artificial Sequence: Synthetic peptide
  Seed: SIGKVCRTLLAKSVF
SILKVFRTLLNKSVF

SEQ ID NO: 268709 - protein, 15 aa, Artificial Sequence
  Description of Artificial Sequence: Synthetic peptide
  Seed: SIGKVCRTLLAKSVF
SILKVFRTLLQKSVF

SEQ ID NO: 268710 - protein, 15 aa, Artificial Sequence
  Description of Artificial Sequence: Synthetic peptide
  Seed: SIGKVCRTLLAKSVF
SILKVFRTLLRKSVF

SEQ ID NO: 268711 - protein, 15 aa, Artificial Sequence
  Description of Artificial Sequence: Synthetic peptide
  Seed: SIGKVCRTLLAKSVF
SILKVFRTLLSKSVF

SEQ ID NO: 268712 - protein, 15 aa, Artificial Sequence
  Description of Artificial Sequence: Synthetic peptide
  Seed: SIGKVCRTLLAKSVF
SILKVFRTLLTKSVF

SEQ ID NO: 268713 - protein, 15 aa, Artificial Sequence
  Description of Artificial Sequence: Synthetic peptide
  Seed: SIGKVCRTLLAKSVF
SILKVFRVLLHKSVF

SEQ ID NO: 268714 - protein, 15 aa, Artificial Sequence
  Description of Artificial Sequence: Synthetic peptide
  Seed: SIGKVCRTLLAKSVF
SILKVGRHLLAKSVF

SEQ ID NO: 268715 - protein, 15 aa, Artificial Sequence
  Description of Artificial Sequence: Synthetic peptide
  Seed: SIGKVCRTLLAKSVF
SILKVGRHLLGKSVF

SEQ ID NO: 268716 - protein, 15 aa, Artificial Sequence
  Description of Artificial Sequence: Synthetic peptide
  Seed: SIGKVCRTLLAKSVF
SILKVGRHLLQKSVF

SEQ ID NO: 268717 - protein, 15 aa, Artificial Sequence
  Description of Artificial Sequence: Synthetic peptide
  Seed: SIGKVCRTLLAKSVF
SILKVGRHLLSKSVF

SEQ ID NO: 268718 - protein, 15 aa, Artificial Sequence
  Description of Artificial Sequence: Synthetic peptide
  Seed: SIGKVCRTLLAKSVF
SILKVGRKLLAKSVF

SEQ ID NO: 268719 - protein, 15 aa, Artificial Sequence
  Description of Artificial Sequence: Synthetic peptide
  Seed: SIGKVCRTLLAKSVF
SILKVGRKLLCKSVF

SEQ ID NO: 268720 - protein, 15 aa, Artificial Sequence
  Description of Artificial Sequence: Synthetic peptide
  Seed: SIGKVCRTLLAKSVF
SILKVGRKLLDKSVF

SEQ ID NO: 268721 - protein, 15 aa, Artificial Sequence
  Description of Artificial Sequence: Synthetic peptide
  Seed: SIGKVCRTLLAKSVF
SILKVGRKLLEKSVF

SEQ ID NO: 268722 - protein, 15 aa, Artificial Sequence
  Description of Artificial Sequence: Synthetic peptide
  Seed: SIGKVCRTLLAKSVF
SILKVGRKLLFKSVF

SEQ ID NO: 268723 - protein, 15 aa, Artificial Sequence
  Description of Artificial Sequence: Synthetic peptide
  Seed: SIGKVCRTLLAKSVF
SILKVGRKLLGKSVF

SEQ ID NO: 268724 - protein, 15 aa, Artificial Sequence
  Description of Artificial Sequence: Synthetic peptide
  Seed: SIGKVCRTLLAKSVF
SILKVGRKLLHKSVF

SEQ ID NO: 268725 - protein, 15 aa, Artificial Sequence
  Description of Artificial Sequence: Synthetic peptide
  Seed: SIGKVCRTLLAKSVF
SILKVGRKLLIKSVF

SEQ ID NO: 268726 - protein, 15 aa, Artificial Sequence
  Description of Artificial Sequence: Synthetic peptide
  Seed: SIGKVCRTLLAKSVF
SILKVGRKLLKKSVF

SEQ ID NO: 268727 - protein, 15 aa, Artificial Sequence
  Description of Artificial Sequence: Synthetic peptide
  Seed: SIGKVCRTLLAKSVF
SILKVGRKLLLKSVF

SEQ ID NO: 268728 - protein, 15 aa, Artificial Sequence
  Description of Artificial Sequence: Synthetic peptide
  Seed: SIGKVCRTLLAKSVF
SILKVGRKLLMKSVF

SEQ ID NO: 268729 - protein, 15 aa, Artificial Sequence
  Description of Artificial Sequence: Synthetic peptide
  Seed: SIGKVCRTLLAKSVF
SILKVGRKLLNKSVF

SEQ ID NO: 268730 - protein, 15 aa, Artificial Sequence
  Description of Artificial Sequence: Synthetic peptide
  Seed: SIGKVCRTLLAKSVF
SILKVGRKLLPKSVF

SEQ ID NO: 268731 - protein, 15 aa, Artificial Sequence
  Description of Artificial Sequence: Synthetic peptide
  Seed: SIGKVCRTLLAKSVF
SILKVGRKLLQKSVF

SEQ ID NO: 268732 - protein, 15 aa, Artificial Sequence
  Description of Artificial Sequence: Synthetic peptide
  Seed: SIGKVCRTLLAKSVF
SILKVGRKLLRKSVF

SEQ ID NO: 268733 - protein, 15 aa, Artificial Sequence
  Description of Artificial Sequence: Synthetic peptide
  Seed: SIGKVCRTLLAKSVF
SILKVGRKLLSKSVF

SEQ ID NO: 268734 - protein, 15 aa, Artificial Sequence
  Description of Artificial Sequence: Synthetic peptide
  Seed: SIGKVCRTLLAKSVF
SILKVGRKLLTKSVF

SEQ ID NO: 268735 - protein, 15 aa, Artificial Sequence
  Description of Artificial Sequence: Synthetic peptide
  Seed: SIGKVCRTLLAKSVF
SILKVGRKLLVKSVF

SEQ ID NO: 268736 - protein, 15 aa, Artificial Sequence
  Description of Artificial Sequence: Synthetic peptide
  Seed: SIGKVCRTLLAKSVF
SILKVGRKLLYKSVF

SEQ ID NO: 268737 - protein, 15 aa, Artificial Sequence
  Description of Artificial Sequence: Synthetic peptide
  Seed: SIGKVCRTLLAKSVF
SILKVGRRLLAKSVF

SEQ ID NO: 268738 - protein, 15 aa, Artificial Sequence
  Description of Artificial Sequence: Synthetic peptide
  Seed: SIGKVCRTLLAKSVF
SILKVGRRLLCKSVF

SEQ ID NO: 268739 - protein, 15 aa, Artificial Sequence
  Description of Artificial Sequence: Synthetic peptide
  Seed: SIGKVCRTLLAKSVF
SILKVGRRLLDKSVF

SEQ ID NO: 268740 - protein, 15 aa, Artificial Sequence
  Description of Artificial Sequence: Synthetic peptide
  Seed: SIGKVCRTLLAKSVF
SILKVGRRLLEKSVF

SEQ ID NO: 268741 - protein, 15 aa, Artificial Sequence
  Description of Artificial Sequence: Synthetic peptide
  Seed: SIGKVCRTLLAKSVF
SILKVGRRLLGKSVF

SEQ ID NO: 268742 - protein, 15 aa, Artificial Sequence
  Description of Artificial Sequence: Synthetic peptide
  Seed: SIGKVCRTLLAKSVF
SILKVGRRLLHKSVF

SEQ ID NO: 268743 - protein, 15 aa, Artificial Sequence
  Description of Artificial Sequence: Synthetic peptide
  Seed: SIGKVCRTLLAKSVF
SILKVGRRLLIKSVF

SEQ ID NO: 268744 - protein, 15 aa, Artificial Sequence
  Description of Artificial Sequence: Synthetic peptide
  Seed: SIGKVCRTLLAKSVF
SILKVGRRLLLKSVF

SEQ ID NO: 268745 - protein, 15 aa, Artificial Sequence
  Description of Artificial Sequence: Synthetic peptide
  Seed: SIGKVCRTLLAKSVF
SILKVGRRLLMKSVF

SEQ ID NO: 268746 - protein, 15 aa, Artificial Sequence
  Description of Artificial Sequence: Synthetic peptide
  Seed: SIGKVCRTLLAKSVF
SILKVGRRLLNKSVF

SEQ ID NO: 268747 - protein, 15 aa, Artificial Sequence
  Description of Artificial Sequence: Synthetic peptide
  Seed: SIGKVCRTLLAKSVF
SILKVGRRLLPKSVF

SEQ ID NO: 268748 - protein, 15 aa, Artificial Sequence
  Description of Artificial Sequence: Synthetic peptide
  Seed: SIGKVCRTLLAKSVF
SILKVGRRLLQKSVF

SEQ ID NO: 268749 - protein, 15 aa, Artificial Sequence
  Description of Artificial Sequence: Synthetic peptide
  Seed: SIGKVCRTLLAKSVF
SILKVGRRLLRKSVF

SEQ ID NO: 268750 - protein, 15 aa, Artificial Sequence
  Description of Artificial Sequence: Synthetic peptide
  Seed: SIGKVCRTLLAKSVF
SILKVGRRLLSKSVF

SEQ ID NO: 268751 - protein, 15 aa, Artificial Sequence
  Description of Artificial Sequence: Synthetic peptide
  Seed: SIGKVCRTLLAKSVF
SILKVGRRLLTKSVF

SEQ ID NO: 268752 - protein, 15 aa, Artificial Sequence
  Description of Artificial Sequence: Synthetic peptide
  Seed: SIGKVCRTLLAKSVF
SILKVGRRLLVKSVF

SEQ ID NO: 268753 - protein, 15 aa, Artificial Sequence
  Description of Artificial Sequence: Synthetic peptide
  Seed: SIGKVCRTLLAKSVF
SILKVGRRLLYKSVF

SEQ ID NO: 268754 - protein, 15 aa, Artificial Sequence
  Description of Artificial Sequence: Synthetic peptide
  Seed: SIGKVCRTLLAKSVF
SILKVGRSLLAKSVF

SEQ ID NO: 268755 - protein, 15 aa, Artificial Sequence
  Description of Artificial Sequence: Synthetic peptide
  Seed: SIGKVCRTLLAKSVF
SILKVGRSLLQKSVF

SEQ ID NO: 268756 - protein, 15 aa, Artificial Sequence
  Description of Artificial Sequence: Synthetic peptide
  Seed: SIGKVCRTLLAKSVF
SILKVGRSLLSKSVF

SEQ ID NO: 268757 - protein, 15 aa, Artificial Sequence
  Description of Artificial Sequence: Synthetic peptide
  Seed: SIGKVCRTLLAKSVF
SILKVGRTLLAKSVF

SEQ ID NO: 268758 - protein, 15 aa, Artificial Sequence
  Description of Artificial Sequence: Synthetic peptide
  Seed: SIGKVCRTLLAKSVF
SILKVGRTLLQKSVF

SEQ ID NO: 268759 - protein, 15 aa, Artificial Sequence
  Description of Artificial Sequence: Synthetic peptide
  Seed: SIGKVCRTLLAKSVF
SILKVGRTLLSKSVF

SEQ ID NO: 268760 - protein, 15 aa, Artificial Sequence
  Description of Artificial Sequence: Synthetic peptide
  Seed: SIGKVCRTLLAKSVF
SILKVHRALLAKSVF

SEQ ID NO: 268761 - protein, 15 aa, Artificial Sequence
  Description of Artificial Sequence: Synthetic peptide
  Seed: SIGKVCRTLLAKSVF
SILKVHRALLGKSVF

SEQ ID NO: 268762 - protein, 15 aa, Artificial Sequence
  Description of Artificial Sequence: Synthetic peptide
  Seed: SIGKVCRTLLAKSVF
SILKVHRALLQKSVF

SEQ ID NO: 268763 - protein, 15 aa, Artificial Sequence
  Description of Artificial Sequence: Synthetic peptide
  Seed: SIGKVCRTLLAKSVF
SILKVHRALLRKSVF

SEQ ID NO: 268764 - protein, 15 aa, Artificial Sequence
  Description of Artificial Sequence: Synthetic peptide
  Seed: SIGKVCRTLLAKSVF
SILKVHRALLSKSVF

SEQ ID NO: 268765 - protein, 15 aa, Artificial Sequence
  Description of Artificial Sequence: Synthetic peptide
  Seed: SIGKVCRTLLAKSVF
SILKVHRALLYKSVF

SEQ ID NO: 268766 - protein, 15 aa, Artificial Sequence
  Description of Artificial Sequence: Synthetic peptide
  Seed: SIGKVCRTLLAKSVF
SILKVHRCLLRKSVF

SEQ ID NO: 268767 - protein, 15 aa, Artificial Sequence
  Description of Artificial Sequence: Synthetic peptide
  Seed: SIGKVCRTLLAKSVF
SILKVHRGLLGKSVF

SEQ ID NO: 268768 - protein, 15 aa, Artificial Sequence
  Description of Artificial Sequence: Synthetic peptide
  Seed: SIGKVCRTLLAKSVF
SILKVHRGLLQKSVF

SEQ ID NO: 268769 - protein, 15 aa, Artificial Sequence
  Description of Artificial Sequence: Synthetic peptide
  Seed: SIGKVCRTLLAKSVF
SILKVHRHLLAKSVF

SEQ ID NO: 268770 - protein, 15 aa, Artificial Sequence
  Description of Artificial Sequence: Synthetic peptide
  Seed: SIGKVCRTLLAKSVF
SILKVHRHLLGKSVF

SEQ ID NO: 268771 - protein, 15 aa, Artificial Sequence
  Description of Artificial Sequence: Synthetic peptide
  Seed: SIGKVCRTLLAKSVF
SILKVHRHLLQKSVF

SEQ ID NO: 268772 - protein, 15 aa, Artificial Sequence
  Description of Artificial Sequence: Synthetic peptide
  Seed: SIGKVCRTLLAKSVF
SILKVHRHLLSKSVF

SEQ ID NO: 268773 - protein, 15 aa, Artificial Sequence
  Description of Artificial Sequence: Synthetic peptide
  Seed: SIGKVCRTLLAKSVF
SILKVHRHLLYKSVF

SEQ ID NO: 268774 - protein, 15 aa, Artificial Sequence
  Description of Artificial Sequence: Synthetic peptide
  Seed: SIGKVCRTLLAKSVF
SILKVHRILLGKSVF

SEQ ID NO: 268775 - protein, 15 aa, Artificial Sequence
  Description of Artificial Sequence: Synthetic peptide
  Seed: SIGKVCRTLLAKSVF
SILKVHRILLQKSVF

SEQ ID NO: 268776 - protein, 15 aa, Artificial Sequence
  Description of Artificial Sequence: Synthetic peptide
  Seed: SIGKVCRTLLAKSVF
SILKVHRILLRKSVF

SEQ ID NO: 268777 - protein, 15 aa, Artificial Sequence
  Description of Artificial Sequence: Synthetic peptide
  Seed: SIGKVCRTLLAKSVF
SILKVHRKLLAKSVF

SEQ ID NO: 268778 - protein, 15 aa, Artificial Sequence
  Description of Artificial Sequence: Synthetic peptide
  Seed: SIGKVCRTLLAKSVF
SILKVHRKLLCKSVF

SEQ ID NO: 268779 - protein, 15 aa, Artificial Sequence
  Description of Artificial Sequence: Synthetic peptide
  Seed: SIGKVCRTLLAKSVF
SILKVHRKLLDKSVF

SEQ ID NO: 268780 - protein, 15 aa, Artificial Sequence
  Description of Artificial Sequence: Synthetic peptide
  Seed: SIGKVCRTLLAKSVF
SILKVHRKLLEKSVF

SEQ ID NO: 268781 - protein, 15 aa, Artificial Sequence
  Description of Artificial Sequence: Synthetic peptide
  Seed: SIGKVCRTLLAKSVF
SILKVHRKLLFKSVF

SEQ ID NO: 268782 - protein, 15 aa, Artificial Sequence
  Description of Artificial Sequence: Synthetic peptide
  Seed: SIGKVCRTLLAKSVF
SILKVHRKLLGKSVF

SEQ ID NO: 268783 - protein, 15 aa, Artificial Sequence
  Description of Artificial Sequence: Synthetic peptide
  Seed: SIGKVCRTLLAKSVF
SILKVHRKLLHKSVF

SEQ ID NO: 268784 - protein, 15 aa, Artificial Sequence
  Description of Artificial Sequence: Synthetic peptide
  Seed: SIGKVCRTLLAKSVF
SILKVHRKLLIKSVF

SEQ ID NO: 268785 - protein, 15 aa, Artificial Sequence
  Description of Artificial Sequence: Synthetic peptide
  Seed: SIGKVCRTLLAKSVF
SILKVHRKLLKKSVF

SEQ ID NO: 268786 - protein, 15 aa, Artificial Sequence
  Description of Artificial Sequence: Synthetic peptide
  Seed: SIGKVCRTLLAKSVF
SILKVHRKLLLKSVF

SEQ ID NO: 268787 - protein, 15 aa, Artificial Sequence
  Description of Artificial Sequence: Synthetic peptide
  Seed: SIGKVCRTLLAKSVF
SILKVHRKLLMKSVF

SEQ ID NO: 268788 - protein, 15 aa, Artificial Sequence
  Description of Artificial Sequence: Synthetic peptide
  Seed: SIGKVCRTLLAKSVF
SILKVHRKLLNKSVF

SEQ ID NO: 268789 - protein, 15 aa, Artificial Sequence
  Description of Artificial Sequence: Synthetic peptide
  Seed: SIGKVCRTLLAKSVF
SILKVHRKLLPKSVF

SEQ ID NO: 268790 - protein, 15 aa, Artificial Sequence
  Description of Artificial Sequence: Synthetic peptide
  Seed: SIGKVCRTLLAKSVF
SILKVHRKLLQKSVF

SEQ ID NO: 268791 - protein, 15 aa, Artificial Sequence
  Description of Artificial Sequence: Synthetic peptide
  Seed: SIGKVCRTLLAKSVF
SILKVHRKLLRKSVF

SEQ ID NO: 268792 - protein, 15 aa, Artificial Sequence
  Description of Artificial Sequence: Synthetic peptide
  Seed: SIGKVCRTLLAKSVF
SILKVHRKLLSKSVF

SEQ ID NO: 268793 - protein, 15 aa, Artificial Sequence
  Description of Artificial Sequence: Synthetic peptide
  Seed: SIGKVCRTLLAKSVF
SILKVHRKLLTKSVF

SEQ ID NO: 268794 - protein, 15 aa, Artificial Sequence
  Description of Artificial Sequence: Synthetic peptide
  Seed: SIGKVCRTLLAKSVF
SILKVHRKLLVKSVF

SEQ ID NO: 268795 - protein, 15 aa, Artificial Sequence
  Description of Artificial Sequence: Synthetic peptide
  Seed: SIGKVCRTLLAKSVF
SILKVHRKLLWKSVF

SEQ ID NO: 268796 - protein, 15 aa, Artificial Sequence
  Description of Artificial Sequence: Synthetic peptide
  Seed: SIGKVCRTLLAKSVF
SILKVHRKLLYKSVF

SEQ ID NO: 268797 - protein, 15 aa, Artificial Sequence
  Description of Artificial Sequence: Synthetic peptide
  Seed: SIGKVCRTLLAKSVF
SILKVHRMLLRKSVF

SEQ ID NO: 268798 - protein, 15 aa, Artificial Sequence
  Description of Artificial Sequence: Synthetic peptide
  Seed: SIGKVCRTLLAKSVF
SILKVHRNLLAKSVF

SEQ ID NO: 268799 - protein, 15 aa, Artificial Sequence
  Description of Artificial Sequence: Synthetic peptide
  Seed: SIGKVCRTLLAKSVF
SILKVHRNLLGKSVF

SEQ ID NO: 268800 - protein, 15 aa, Artificial Sequence
  Description of Artificial Sequence: Synthetic peptide
  Seed: SIGKVCRTLLAKSVF
SILKVHRNLLHKSVF

SEQ ID NO: 268801 - protein, 15 aa, Artificial Sequence
  Description of Artificial Sequence: Synthetic peptide
  Seed: SIGKVCRTLLAKSVF
SILKVHRNLLQKSVF

SEQ ID NO: 268802 - protein, 15 aa, Artificial Sequence
  Description of Artificial Sequence: Synthetic peptide
  Seed: SIGKVCRTLLAKSVF
SILKVHRNLLRKSVF

SEQ ID NO: 268803 - protein, 15 aa, Artificial Sequence
  Description of Artificial Sequence: Synthetic peptide
  Seed: SIGKVCRTLLAKSVF
SILKVHRNLLSKSVF

SEQ ID NO: 268804 - protein, 15 aa, Artificial Sequence
  Description of Artificial Sequence: Synthetic peptide
  Seed: SIGKVCRTLLAKSVF
SILKVHRNLLVKSVF

SEQ ID NO: 268805 - protein, 15 aa, Artificial Sequence
  Description of Artificial Sequence: Synthetic peptide
  Seed: SIGKVCRTLLAKSVF
SILKVHRNLLYKSVF

SEQ ID NO: 268806 - protein, 15 aa, Artificial Sequence
  Description of Artificial Sequence: Synthetic peptide
  Seed: SIGKVCRTLLAKSVF
SILKVHRPLLGKSVF

SEQ ID NO: 268807 - protein, 15 aa, Artificial Sequence
  Description of Artificial Sequence: Synthetic peptide
  Seed: SIGKVCRTLLAKSVF
SILKVHRPLLQKSVF

SEQ ID NO: 268808 - protein, 15 aa, Artificial Sequence
  Description of Artificial Sequence: Synthetic peptide
  Seed: SIGKVCRTLLAKSVF
SILKVHRPLLRKSVF

SEQ ID NO: 268809 - protein, 15 aa, Artificial Sequence
  Description of Artificial Sequence: Synthetic peptide
  Seed: SIGKVCRTLLAKSVF
SILKVHRQLLAKSVF

SEQ ID NO: 268810 - protein, 15 aa, Artificial Sequence
  Description of Artificial Sequence: Synthetic peptide
  Seed: SIGKVCRTLLAKSVF
SILKVHRQLLGKSVF

SEQ ID NO: 268811 - protein, 15 aa, Artificial Sequence
  Description of Artificial Sequence: Synthetic peptide
  Seed: SIGKVCRTLLAKSVF
SILKVHRQLLQKSVF

SEQ ID NO: 268812 - protein, 15 aa, Artificial Sequence
  Description of Artificial Sequence: Synthetic peptide
  Seed: SIGKVCRTLLAKSVF
SILKVHRQLLRKSVF

SEQ ID NO: 268813 - protein, 15 aa, Artificial Sequence
  Description of Artificial Sequence: Synthetic peptide
  Seed: SIGKVCRTLLAKSVF
SILKVHRQLLSKSVF

SEQ ID NO: 268814 - protein, 15 aa, Artificial Sequence
  Description of Artificial Sequence: Synthetic peptide
  Seed: SIGKVCRTLLAKSVF
SILKVHRQLLYKSVF

SEQ ID NO: 268815 - protein, 15 aa, Artificial Sequence
  Description of Artificial Sequence: Synthetic peptide
  Seed: SIGKVCRTLLAKSVF
SILKVHRRLLAKSVF

SEQ ID NO: 268816 - protein, 15 aa, Artificial Sequence
  Description of Artificial Sequence: Synthetic peptide
  Seed: SIGKVCRTLLAKSVF
SILKVHRRLLCKSVF

SEQ ID NO: 268817 - protein, 15 aa, Artificial Sequence
  Description of Artificial Sequence: Synthetic peptide
  Seed: SIGKVCRTLLAKSVF
SILKVHRRLLDKSVF

SEQ ID NO: 268818 - protein, 15 aa, Artificial Sequence
  Description of Artificial Sequence: Synthetic peptide
  Seed: SIGKVCRTLLAKSVF
SILKVHRRLLEKSVF

SEQ ID NO: 268819 - protein, 15 aa, Artificial Sequence
  Description of Artificial Sequence: Synthetic peptide
  Seed: SIGKVCRTLLAKSVF
SILKVHRRLLFKSVF

SEQ ID NO: 268820 - protein, 15 aa, Artificial Sequence
  Description of Artificial Sequence: Synthetic peptide
  Seed: SIGKVCRTLLAKSVF
SILKVHRRLLGKSVF

SEQ ID NO: 268821 - protein, 15 aa, Artificial Sequence
  Description of Artificial Sequence: Synthetic peptide
  Seed: SIGKVCRTLLAKSVF
SILKVHRRLLHKSVF

SEQ ID NO: 268822 - protein, 15 aa, Artificial Sequence
  Description of Artificial Sequence: Synthetic peptide
  Seed: SIGKVCRTLLAKSVF
SILKVHRRLLIKSVF

SEQ ID NO: 268823 - protein, 15 aa, Artificial Sequence
  Description of Artificial Sequence: Synthetic peptide
  Seed: SIGKVCRTLLAKSVF
SILKVHRRLLKKSVF

SEQ ID NO: 268824 - protein, 15 aa, Artificial Sequence
  Description of Artificial Sequence: Synthetic peptide
  Seed: SIGKVCRTLLAKSVF
SILKVHRRLLLKSVF

SEQ ID NO: 268825 - protein, 15 aa, Artificial Sequence
  Description of Artificial Sequence: Synthetic peptide
  Seed: SIGKVCRTLLAKSVF
SILKVHRRLLMKSVF

SEQ ID NO: 268826 - protein, 15 aa, Artificial Sequence
  Description of Artificial Sequence: Synthetic peptide
  Seed: SIGKVCRTLLAKSVF
SILKVHRRLLNKSVF

SEQ ID NO: 268827 - protein, 15 aa, Artificial Sequence
  Description of Artificial Sequence: Synthetic peptide
  Seed: SIGKVCRTLLAKSVF
SILKVHRRLLPKSVF

SEQ ID NO: 268828 - protein, 15 aa, Artificial Sequence
  Description of Artificial Sequence: Synthetic peptide
  Seed: SIGKVCRTLLAKSVF
SILKVHRRLLQKSVF

SEQ ID NO: 268829 - protein, 15 aa, Artificial Sequence
  Description of Artificial Sequence: Synthetic peptide
  Seed: SIGKVCRTLLAKSVF
SILKVHRRLLRKSVF

SEQ ID NO: 268830 - protein, 15 aa, Artificial Sequence
  Description of Artificial Sequence: Synthetic peptide
  Seed: SIGKVCRTLLAKSVF
SILKVHRRLLSKSVF

SEQ ID NO: 268831 - protein, 15 aa, Artificial Sequence
  Description of Artificial Sequence: Synthetic peptide
  Seed: SIGKVCRTLLAKSVF
SILKVHRRLLTKSVF

SEQ ID NO: 268832 - protein, 15 aa, Artificial Sequence
  Description of Artificial Sequence: Synthetic peptide
  Seed: SIGKVCRTLLAKSVF
SILKVHRRLLVKSVF

SEQ ID NO: 268833 - protein, 15 aa, Artificial Sequence
  Description of Artificial Sequence: Synthetic peptide
  Seed: SIGKVCRTLLAKSVF
SILKVHRRLLWKSVF

SEQ ID NO: 268834 - protein, 15 aa, Artificial Sequence
  Description of Artificial Sequence: Synthetic peptide
  Seed: SIGKVCRTLLAKSVF
SILKVHRRLLYKSVF

SEQ ID NO: 268835 - protein, 15 aa, Artificial Sequence
  Description of Artificial Sequence: Synthetic peptide
  Seed: SIGKVCRTLLAKSVF
SILKVHRSLLAKSVF

SEQ ID NO: 268836 - protein, 15 aa, Artificial Sequence
  Description of Artificial Sequence: Synthetic peptide
  Seed: SIGKVCRTLLAKSVF
SILKVHRSLLGKSVF

SEQ ID NO: 268837 - protein, 15 aa, Artificial Sequence
  Description of Artificial Sequence: Synthetic peptide
  Seed: SIGKVCRTLLAKSVF
SILKVHRSLLHKSVF

SEQ ID NO: 268838 - protein, 15 aa, Artificial Sequence
  Description of Artificial Sequence: Synthetic peptide
  Seed: SIGKVCRTLLAKSVF
SILKVHRSLLIKSVF

SEQ ID NO: 268839 - protein, 15 aa, Artificial Sequence
  Description of Artificial Sequence: Synthetic peptide
  Seed: SIGKVCRTLLAKSVF
SILKVHRSLLKKSVF

SEQ ID NO: 268840 - protein, 15 aa, Artificial Sequence
  Description of Artificial Sequence: Synthetic peptide
  Seed: SIGKVCRTLLAKSVF
SILKVHRSLLLKSVF

SEQ ID NO: 268841 - protein, 15 aa, Artificial Sequence
  Description of Artificial Sequence: Synthetic peptide
  Seed: SIGKVCRTLLAKSVF
SILKVHRSLLMKSVF

SEQ ID NO: 268842 - protein, 15 aa, Artificial Sequence
  Description of Artificial Sequence: Synthetic peptide
  Seed: SIGKVCRTLLAKSVF
SILKVHRSLLQKSVF

SEQ ID NO: 268843 - protein, 15 aa, Artificial Sequence
  Description of Artificial Sequence: Synthetic peptide
  Seed: SIGKVCRTLLAKSVF
SILKVHRSLLRKSVF

SEQ ID NO: 268844 - protein, 15 aa, Artificial Sequence
  Description of Artificial Sequence: Synthetic peptide
  Seed: SIGKVCRTLLAKSVF
SILKVHRSLLSKSVF

SEQ ID NO: 268845 - protein, 15 aa, Artificial Sequence
  Description of Artificial Sequence: Synthetic peptide
  Seed: SIGKVCRTLLAKSVF
SILKVHRSLLTKSVF

SEQ ID NO: 268846 - protein, 15 aa, Artificial Sequence
  Description of Artificial Sequence: Synthetic peptide
  Seed: SIGKVCRTLLAKSVF
SILKVHRSLLVKSVF

SEQ ID NO: 268847 - protein, 15 aa, Artificial Sequence
  Description of Artificial Sequence: Synthetic peptide
  Seed: SIGKVCRTLLAKSVF
SILKVHRSLLYKSVF

SEQ ID NO: 268848 - protein, 15 aa, Artificial Sequence
  Description of Artificial Sequence: Synthetic peptide
  Seed: SIGKVCRTLLAKSVF
SILKVHRTLLAKSVF

SEQ ID NO: 268849 - protein, 15 aa, Artificial Sequence
  Description of Artificial Sequence: Synthetic peptide
  Seed: SIGKVCRTLLAKSVF
SILKVHRTLLFKSVF

SEQ ID NO: 268850 - protein, 15 aa, Artificial Sequence
  Description of Artificial Sequence: Synthetic peptide
  Seed: SIGKVCRTLLAKSVF
SILKVHRTLLGKSVF

SEQ ID NO: 268851 - protein, 15 aa, Artificial Sequence
  Description of Artificial Sequence: Synthetic peptide
  Seed: SIGKVCRTLLAKSVF
SILKVHRTLLHKSVF

SEQ ID NO: 268852 - protein, 15 aa, Artificial Sequence
  Description of Artificial Sequence: Synthetic peptide
  Seed: SIGKVCRTLLAKSVF
SILKVHRTLLIKSVF

SEQ ID NO: 268853 - protein, 15 aa, Artificial Sequence
  Description of Artificial Sequence: Synthetic peptide
  Seed: SIGKVCRTLLAKSVF
SILKVHRTLLKKSVF

SEQ ID NO: 268854 - protein, 15 aa, Artificial Sequence
  Description of Artificial Sequence: Synthetic peptide
  Seed: SIGKVCRTLLAKSVF
SILKVHRTLLLKSVF

SEQ ID NO: 268855 - protein, 15 aa, Artificial Sequence
  Description of Artificial Sequence: Synthetic peptide
  Seed: SIGKVCRTLLAKSVF
SILKVHRTLLMKSVF

SEQ ID NO: 268856 - protein, 15 aa, Artificial Sequence
  Description of Artificial Sequence: Synthetic peptide
  Seed: SIGKVCRTLLAKSVF
SILKVHRTLLNKSVF

SEQ ID NO: 268857 - protein, 15 aa, Artificial Sequence
  Description of Artificial Sequence: Synthetic peptide
  Seed: SIGKVCRTLLAKSVF
SILKVHRTLLQKSVF

SEQ ID NO: 268858 - protein, 15 aa, Artificial Sequence
  Description of Artificial Sequence: Synthetic peptide
  Seed: SIGKVCRTLLAKSVF
SILKVHRTLLRKSVF

SEQ ID NO: 268859 - protein, 15 aa, Artificial Sequence
  Description of Artificial Sequence: Synthetic peptide
  Seed: SIGKVCRTLLAKSVF
SILKVHRTLLSKSVF

SEQ ID NO: 268860 - protein, 15 aa, Artificial Sequence
  Description of Artificial Sequence: Synthetic peptide
  Seed: SIGKVCRTLLAKSVF
SILKVHRTLLTKSVF

SEQ ID NO: 268861 - protein, 15 aa, Artificial Sequence
  Description of Artificial Sequence: Synthetic peptide
  Seed: SIGKVCRTLLAKSVF
SILKVHRTLLVKSVF

SEQ ID NO: 268862 - protein, 15 aa, Artificial Sequence
  Description of Artificial Sequence: Synthetic peptide
  Seed: SIGKVCRTLLAKSVF
SILKVHRTLLYKSVF

SEQ ID NO: 268863 - protein, 15 aa, Artificial Sequence
  Description of Artificial Sequence: Synthetic peptide
  Seed: SIGKVCRTLLAKSVF
SILKVHRVLLAKSVF

SEQ ID NO: 268864 - protein, 15 aa, Artificial Sequence
  Description of Artificial Sequence: Synthetic peptide
  Seed: SIGKVCRTLLAKSVF
SILKVHRVLLGKSVF

SEQ ID NO: 268865 - protein, 15 aa, Artificial Sequence
  Description of Artificial Sequence: Synthetic peptide
  Seed: SIGKVCRTLLAKSVF
SILKVHRVLLQKSVF

SEQ ID NO: 268866 - protein, 15 aa, Artificial Sequence
  Description of Artificial Sequence: Synthetic peptide
  Seed: SIGKVCRTLLAKSVF
SILKVHRVLLRKSVF

SEQ ID NO: 268867 - protein, 15 aa, Artificial Sequence
  Description of Artificial Sequence: Synthetic peptide
  Seed: SIGKVCRTLLAKSVF
SILKVHRVLLSKSVF

SEQ ID NO: 268868 - protein, 15 aa, Artificial Sequence
  Description of Artificial Sequence: Synthetic peptide
  Seed: SIGKVCRTLLAKSVF
SILKVHRVLLYKSVF

SEQ ID NO: 268869 - protein, 15 aa, Artificial Sequence
  Description of Artificial Sequence: Synthetic peptide
  Seed: SIGKVCRTLLAKSVF
SILKVIRALLAKSVF

SEQ ID NO: 268870 - protein, 15 aa, Artificial Sequence
  Description of Artificial Sequence: Synthetic peptide
  Seed: SIGKVCRTLLAKSVF
SILKVIRALLGKSVF

SEQ ID NO: 268871 - protein, 15 aa, Artificial Sequence
  Description of Artificial Sequence: Synthetic peptide
  Seed: SIGKVCRTLLAKSVF
SILKVIRALLHKSVF

SEQ ID NO: 268872 - protein, 15 aa, Artificial Sequence
  Description of Artificial Sequence: Synthetic peptide
  Seed: SIGKVCRTLLAKSVF
SILKVIRALLNKSVF

SEQ ID NO: 268873 - protein, 15 aa, Artificial Sequence
  Description of Artificial Sequence: Synthetic peptide
  Seed: SIGKVCRTLLAKSVF
SILKVIRALLPKSVF

SEQ ID NO: 268874 - protein, 15 aa, Artificial Sequence
  Description of Artificial Sequence: Synthetic peptide
  Seed: SIGKVCRTLLAKSVF
SILKVIRALLQKSVF

SEQ ID NO: 268875 - protein, 15 aa, Artificial Sequence
  Description of Artificial Sequence: Synthetic peptide
  Seed: SIGKVCRTLLAKSVF
SILKVIRALLSKSVF

SEQ ID NO: 268876 - protein, 15 aa, Artificial Sequence
  Description of Artificial Sequence: Synthetic peptide
  Seed: SIGKVCRTLLAKSVF
SILKVIRALLTKSVF

SEQ ID NO: 268877 - protein, 15 aa, Artificial Sequence
  Description of Artificial Sequence: Synthetic peptide
  Seed: SIGKVCRTLLAKSVF
SILKVIRALLVKSVF

SEQ ID NO: 268878 - protein, 15 aa, Artificial Sequence
  Description of Artificial Sequence: Synthetic peptide
  Seed: SIGKVCRTLLAKSVF
SILKVIRALLYKSVF

SEQ ID NO: 268879 - protein, 15 aa, Artificial Sequence
  Description of Artificial Sequence: Synthetic peptide
  Seed: SIGKVCRTLLAKSVF
SILKVIRDLLAKSVF

SEQ ID NO: 268880 - protein, 15 aa, Artificial Sequence
  Description of Artificial Sequence: Synthetic peptide
  Seed: SIGKVCRTLLAKSVF
SILKVIRDLLSKSVF

SEQ ID NO: 268881 - protein, 15 aa, Artificial Sequence
  Description of Artificial Sequence: Synthetic peptide
  Seed: SIGKVCRTLLAKSVF
SILKVIRELLSKSVF

SEQ ID NO: 268882 - protein, 15 aa, Artificial Sequence
  Description of Artificial Sequence: Synthetic peptide
  Seed: SIGKVCRTLLAKSVF
SILKVIRGLLAKSVF

SEQ ID NO: 268883 - protein, 15 aa, Artificial Sequence
  Description of Artificial Sequence: Synthetic peptide
  Seed: SIGKVCRTLLAKSVF
SILKVIRGLLGKSVF

SEQ ID NO: 268884 - protein, 15 aa, Artificial Sequence
  Description of Artificial Sequence: Synthetic peptide
  Seed: SIGKVCRTLLAKSVF
SILKVIRGLLHKSVF

SEQ ID NO: 268885 - protein, 15 aa, Artificial Sequence
  Description of Artificial Sequence: Synthetic peptide
  Seed: SIGKVCRTLLAKSVF
SILKVIRGLLMKSVF

SEQ ID NO: 268886 - protein, 15 aa, Artificial Sequence
  Description of Artificial Sequence: Synthetic peptide
  Seed: SIGKVCRTLLAKSVF
SILKVIRGLLNKSVF

SEQ ID NO: 268887 - protein, 15 aa, Artificial Sequence
  Description of Artificial Sequence: Synthetic peptide
  Seed: SIGKVCRTLLAKSVF
SILKVIRGLLQKSVF

SEQ ID NO: 268888 - protein, 15 aa, Artificial Sequence
  Description of Artificial Sequence: Synthetic peptide
  Seed: SIGKVCRTLLAKSVF
SILKVIRGLLSKSVF

SEQ ID NO: 268889 - protein, 15 aa, Artificial Sequence
  Description of Artificial Sequence: Synthetic peptide
  Seed: SIGKVCRTLLAKSVF
SILKVIRGLLTKSVF

SEQ ID NO: 268890 - protein, 15 aa, Artificial Sequence
  Description of Artificial Sequence: Synthetic peptide
  Seed: SIGKVCRTLLAKSVF
SILKVIRGLLVKSVF

SEQ ID NO: 268891 - protein, 15 aa, Artificial Sequence
  Description of Artificial Sequence: Synthetic peptide
  Seed: SIGKVCRTLLAKSVF
SILKVIRGLLYKSVF

SEQ ID NO: 268892 - protein, 15 aa, Artificial Sequence
  Description of Artificial Sequence: Synthetic peptide
  Seed: SIGKVCRTLLAKSVF
SILKVIRHLLAKSVF

SEQ ID NO: 268893 - protein, 15 aa, Artificial Sequence
  Description of Artificial Sequence: Synthetic peptide
  Seed: SIGKVCRTLLAKSVF
SILKVIRHLLDKSVF

SEQ ID NO: 268894 - protein, 15 aa, Artificial Sequence
  Description of Artificial Sequence: Synthetic peptide
  Seed: SIGKVCRTLLAKSVF
SILKVIRHLLEKSVF

SEQ ID NO: 268895 - protein, 15 aa, Artificial Sequence
  Description of Artificial Sequence: Synthetic peptide
  Seed: SIGKVCRTLLAKSVF
SILKVIRHLLGKSVF

SEQ ID NO: 268896 - protein, 15 aa, Artificial Sequence
  Description of Artificial Sequence: Synthetic peptide
  Seed: SIGKVCRTLLAKSVF
SILKVIRHLLHKSVF

SEQ ID NO: 268897 - protein, 15 aa, Artificial Sequence
  Description of Artificial Sequence: Synthetic peptide
  Seed: SIGKVCRTLLAKSVF
SILKVIRHLLIKSVF

SEQ ID NO: 268898 - protein, 15 aa, Artificial Sequence
  Description of Artificial Sequence: Synthetic peptide
  Seed: SIGKVCRTLLAKSVF
SILKVIRHLLKKSVF

SEQ ID NO: 268899 - protein, 15 aa, Artificial Sequence
  Description of Artificial Sequence: Synthetic peptide
  Seed: SIGKVCRTLLAKSVF
SILKVIRHLLLKSVF

SEQ ID NO: 268900 - protein, 15 aa, Artificial Sequence
  Description of Artificial Sequence: Synthetic peptide
  Seed: SIGKVCRTLLAKSVF
SILKVIRHLLMKSVF

SEQ ID NO: 268901 - protein, 15 aa, Artificial Sequence
  Description of Artificial Sequence: Synthetic peptide
  Seed: SIGKVCRTLLAKSVF
SILKVIRHLLNKSVF

SEQ ID NO: 268902 - protein, 15 aa, Artificial Sequence
  Description of Artificial Sequence: Synthetic peptide
  Seed: SIGKVCRTLLAKSVF
SILKVIRHLLPKSVF

SEQ ID NO: 268903 - protein, 15 aa, Artificial Sequence
  Description of Artificial Sequence: Synthetic peptide
  Seed: SIGKVCRTLLAKSVF
SILKVIRHLLQKSVF

SEQ ID NO: 268904 - protein, 15 aa, Artificial Sequence
  Description of Artificial Sequence: Synthetic peptide
  Seed: SIGKVCRTLLAKSVF
SILKVIRHLLRKSVF

SEQ ID NO: 268905 - protein, 15 aa, Artificial Sequence
  Description of Artificial Sequence: Synthetic peptide
  Seed: SIGKVCRTLLAKSVF
SILKVIRHLLSKSVF

SEQ ID NO: 268906 - protein, 15 aa, Artificial Sequence
  Description of Artificial Sequence: Synthetic peptide
  Seed: SIGKVCRTLLAKSVF
SILKVIRHLLTKSVF

SEQ ID NO: 268907 - protein, 15 aa, Artificial Sequence
  Description of Artificial Sequence: Synthetic peptide
  Seed: SIGKVCRTLLAKSVF
SILKVIRHLLVKSVF

SEQ ID NO: 268908 - protein, 15 aa, Artificial Sequence
  Description of Artificial Sequence: Synthetic peptide
  Seed: SIGKVCRTLLAKSVF
SILKVIRHLLYKSVF

SEQ ID NO: 268909 - protein, 15 aa, Artificial Sequence
  Description of Artificial Sequence: Synthetic peptide
  Seed: SIGKVCRTLLAKSVF
SILKVIRILLSKSVF

SEQ ID NO: 268910 - protein, 15 aa, Artificial Sequence
  Description of Artificial Sequence: Synthetic peptide
  Seed: SIGKVCRTLLAKSVF
SILKVIRKLLAKSVF

SEQ ID NO: 268911 - protein, 15 aa, Artificial Sequence
  Description of Artificial Sequence: Synthetic peptide
  Seed: SIGKVCRTLLAKSVF
SILKVIRKLLCKSVF

SEQ ID NO: 268912 - protein, 15 aa, Artificial Sequence
  Description of Artificial Sequence: Synthetic peptide
  Seed: SIGKVCRTLLAKSVF
SILKVIRKLLDKSVF

SEQ ID NO: 268913 - protein, 15 aa, Artificial Sequence
  Description of Artificial Sequence: Synthetic peptide
  Seed: SIGKVCRTLLAKSVF
SILKVIRKLLEKSVF

SEQ ID NO: 268914 - protein, 15 aa, Artificial Sequence
  Description of Artificial Sequence: Synthetic peptide
  Seed: SIGKVCRTLLAKSVF
SILKVIRKLLFKSVF

SEQ ID NO: 268915 - protein, 15 aa, Artificial Sequence
  Description of Artificial Sequence: Synthetic peptide
  Seed: SIGKVCRTLLAKSVF
SILKVIRKLLGKSVF

SEQ ID NO: 268916 - protein, 15 aa, Artificial Sequence
  Description of Artificial Sequence: Synthetic peptide
  Seed: SIGKVCRTLLAKSVF
SILKVIRKLLHKSVF

SEQ ID NO: 268917 - protein, 15 aa, Artificial Sequence
  Description of Artificial Sequence: Synthetic peptide
  Seed: SIGKVCRTLLAKSVF
SILKVIRKLLIKSVF

SEQ ID NO: 268918 - protein, 15 aa, Artificial Sequence
  Description of Artificial Sequence: Synthetic peptide
  Seed: SIGKVCRTLLAKSVF
SILKVIRKLLKKSVF

SEQ ID NO: 268919 - protein, 15 aa, Artificial Sequence
  Description of Artificial Sequence: Synthetic peptide
  Seed: SIGKVCRTLLAKSVF
SILKVIRKLLLKSVF

SEQ ID NO: 268920 - protein, 15 aa, Artificial Sequence
  Description of Artificial Sequence: Synthetic peptide
  Seed: SIGKVCRTLLAKSVF
SILKVIRKLLMKSVF

SEQ ID NO: 268921 - protein, 15 aa, Artificial Sequence
  Description of Artificial Sequence: Synthetic peptide
  Seed: SIGKVCRTLLAKSVF
SILKVIRKLLNKSVF

SEQ ID NO: 268922 - protein, 15 aa, Artificial Sequence
  Description of Artificial Sequence: Synthetic peptide
  Seed: SIGKVCRTLLAKSVF
SILKVIRKLLPKSVF

SEQ ID NO: 268923 - protein, 15 aa, Artificial Sequence
  Description of Artificial Sequence: Synthetic peptide
  Seed: SIGKVCRTLLAKSVF
SILKVIRKLLQKSVF

SEQ ID NO: 268924 - protein, 15 aa, Artificial Sequence
  Description of Artificial Sequence: Synthetic peptide
  Seed: SIGKVCRTLLAKSVF
SILKVIRKLLRKSVF

SEQ ID NO: 268925 - protein, 15 aa, Artificial Sequence
  Description of Artificial Sequence: Synthetic peptide
  Seed: SIGKVCRTLLAKSVF
SILKVIRKLLSKSVF

SEQ ID NO: 268926 - protein, 15 aa, Artificial Sequence
  Description of Artificial Sequence: Synthetic peptide
  Seed: SIGKVCRTLLAKSVF
SILKVIRKLLTKSVF

SEQ ID NO: 268927 - protein, 15 aa, Artificial Sequence
  Description of Artificial Sequence: Synthetic peptide
  Seed: SIGKVCRTLLAKSVF
SILKVIRKLLVKSVF

SEQ ID NO: 268928 - protein, 15 aa, Artificial Sequence
  Description of Artificial Sequence: Synthetic peptide
  Seed: SIGKVCRTLLAKSVF
SILKVIRKLLWKSVF

SEQ ID NO: 268929 - protein, 15 aa, Artificial Sequence
  Description of Artificial Sequence: Synthetic peptide
  Seed: SIGKVCRTLLAKSVF
SILKVIRKLLYKSVF

SEQ ID NO: 268930 - protein, 15 aa, Artificial Sequence
  Description of Artificial Sequence: Synthetic peptide
  Seed: SIGKVCRTLLAKSVF
SILKVIRNLLAKSVF

SEQ ID NO: 268931 - protein, 15 aa, Artificial Sequence
  Description of Artificial Sequence: Synthetic peptide
  Seed: SIGKVCRTLLAKSVF
SILKVIRNLLDKSVF

SEQ ID NO: 268932 - protein, 15 aa, Artificial Sequence
  Description of Artificial Sequence: Synthetic peptide
  Seed: SIGKVCRTLLAKSVF
SILKVIRNLLEKSVF

SEQ ID NO: 268933 - protein, 15 aa, Artificial Sequence
  Description of Artificial Sequence: Synthetic peptide
  Seed: SIGKVCRTLLAKSVF
SILKVIRNLLGKSVF

SEQ ID NO: 268934 - protein, 15 aa, Artificial Sequence
  Description of Artificial Sequence: Synthetic peptide
  Seed: SIGKVCRTLLAKSVF
SILKVIRNLLHKSVF

SEQ ID NO: 268935 - protein, 15 aa, Artificial Sequence
  Description of Artificial Sequence: Synthetic peptide
  Seed: SIGKVCRTLLAKSVF
SILKVIRNLLIKSVF

SEQ ID NO: 268936 - protein, 15 aa, Artificial Sequence
  Description of Artificial Sequence: Synthetic peptide
  Seed: SIGKVCRTLLAKSVF
SILKVIRNLLMKSVF

SEQ ID NO: 268937 - protein, 15 aa, Artificial Sequence
  Description of Artificial Sequence: Synthetic peptide
  Seed: SIGKVCRTLLAKSVF
SILKVIRNLLNKSVF

SEQ ID NO: 268938 - protein, 15 aa, Artificial Sequence
  Description of Artificial Sequence: Synthetic peptide
  Seed: SIGKVCRTLLAKSVF
SILKVIRNLLPKSVF

SEQ ID NO: 268939 - protein, 15 aa, Artificial Sequence
  Description of Artificial Sequence: Synthetic peptide
  Seed: SIGKVCRTLLAKSVF
SILKVIRNLLQKSVF

SEQ ID NO: 268940 - protein, 15 aa, Artificial Sequence
  Description of Artificial Sequence: Synthetic peptide
  Seed: SIGKVCRTLLAKSVF
SILKVIRNLLSKSVF

SEQ ID NO: 268941 - protein, 15 aa, Artificial Sequence
  Description of Artificial Sequence: Synthetic peptide
  Seed: SIGKVCRTLLAKSVF
SILKVIRNLLTKSVF

SEQ ID NO: 268942 - protein, 15 aa, Artificial Sequence
  Description of Artificial Sequence: Synthetic peptide
  Seed: SIGKVCRTLLAKSVF
SILKVIRNLLVKSVF

SEQ ID NO: 268943 - protein, 15 aa, Artificial Sequence
  Description of Artificial Sequence: Synthetic peptide
  Seed: SIGKVCRTLLAKSVF
SILKVIRNLLYKSVF

SEQ ID NO: 268944 - protein, 15 aa, Artificial Sequence
  Description of Artificial Sequence: Synthetic peptide
  Seed: SIGKVCRTLLAKSVF
SILKVIRPLLAKSVF

SEQ ID NO: 268945 - protein, 15 aa, Artificial Sequence
  Description of Artificial Sequence: Synthetic peptide
  Seed: SIGKVCRTLLAKSVF
SILKVIRPLLEKSVF

SEQ ID NO: 268946 - protein, 15 aa, Artificial Sequence
  Description of Artificial Sequence: Synthetic peptide
  Seed: SIGKVCRTLLAKSVF
SILKVIRPLLGKSVF

SEQ ID NO: 268947 - protein, 15 aa, Artificial Sequence
  Description of Artificial Sequence: Synthetic peptide
  Seed: SIGKVCRTLLAKSVF
SILKVIRPLLHKSVF

SEQ ID NO: 268948 - protein, 15 aa, Artificial Sequence
  Description of Artificial Sequence: Synthetic peptide
  Seed: SIGKVCRTLLAKSVF
SILKVIRPLLIKSVF

SEQ ID NO: 268949 - protein, 15 aa, Artificial Sequence
  Description of Artificial Sequence: Synthetic peptide
  Seed: SIGKVCRTLLAKSVF
SILKVIRPLLLKSVF

SEQ ID NO: 268950 - protein, 15 aa, Artificial Sequence
  Description of Artificial Sequence: Synthetic peptide
  Seed: SIGKVCRTLLAKSVF
SILKVIRPLLMKSVF

SEQ ID NO: 268951 - protein, 15 aa, Artificial Sequence
  Description of Artificial Sequence: Synthetic peptide
  Seed: SIGKVCRTLLAKSVF
SILKVIRPLLNKSVF

SEQ ID NO: 268952 - protein, 15 aa, Artificial Sequence
  Description of Artificial Sequence: Synthetic peptide
  Seed: SIGKVCRTLLAKSVF
SILKVIRPLLQKSVF

SEQ ID NO: 268953 - protein, 15 aa, Artificial Sequence
  Description of Artificial Sequence: Synthetic peptide
  Seed: SIGKVCRTLLAKSVF
SILKVIRPLLSKSVF

SEQ ID NO: 268954 - protein, 15 aa, Artificial Sequence
  Description of Artificial Sequence: Synthetic peptide
  Seed: SIGKVCRTLLAKSVF
SILKVIRPLLTKSVF

SEQ ID NO: 268955 - protein, 15 aa, Artificial Sequence
  Description of Artificial Sequence: Synthetic peptide
  Seed: SIGKVCRTLLAKSVF
SILKVIRPLLVKSVF

SEQ ID NO: 268956 - protein, 15 aa, Artificial Sequence
  Description of Artificial Sequence: Synthetic peptide
  Seed: SIGKVCRTLLAKSVF
SILKVIRPLLYKSVF

SEQ ID NO: 268957 - protein, 15 aa, Artificial Sequence
  Description of Artificial Sequence: Synthetic peptide
  Seed: SIGKVCRTLLAKSVF
SILKVIRQLLAKSVF

SEQ ID NO: 268958 - protein, 15 aa, Artificial Sequence
  Description of Artificial Sequence: Synthetic peptide
  Seed: SIGKVCRTLLAKSVF
SILKVIRQLLGKSVF

SEQ ID NO: 268959 - protein, 15 aa, Artificial Sequence
  Description of Artificial Sequence: Synthetic peptide
  Seed: SIGKVCRTLLAKSVF
SILKVIRQLLHKSVF

SEQ ID NO: 268960 - protein, 15 aa, Artificial Sequence
  Description of Artificial Sequence: Synthetic peptide
  Seed: SIGKVCRTLLAKSVF
SILKVIRQLLNKSVF

SEQ ID NO: 268961 - protein, 15 aa, Artificial Sequence
  Description of Artificial Sequence: Synthetic peptide
  Seed: SIGKVCRTLLAKSVF
SILKVIRQLLPKSVF

SEQ ID NO: 268962 - protein, 15 aa, Artificial Sequence
  Description of Artificial Sequence: Synthetic peptide
  Seed: SIGKVCRTLLAKSVF
SILKVIRQLLQKSVF

SEQ ID NO: 268963 - protein, 15 aa, Artificial Sequence
  Description of Artificial Sequence: Synthetic peptide
  Seed: SIGKVCRTLLAKSVF
SILKVIRQLLSKSVF

SEQ ID NO: 268964 - protein, 15 aa, Artificial Sequence
  Description of Artificial Sequence: Synthetic peptide
  Seed: SIGKVCRTLLAKSVF
SILKVIRQLLTKSVF

SEQ ID NO: 268965 - protein, 15 aa, Artificial Sequence
  Description of Artificial Sequence: Synthetic peptide
  Seed: SIGKVCRTLLAKSVF
SILKVIRRLLAKSVF

SEQ ID NO: 268966 - protein, 15 aa, Artificial Sequence
  Description of Artificial Sequence: Synthetic peptide
  Seed: SIGKVCRTLLAKSVF
SILKVIRRLLCKSVF

SEQ ID NO: 268967 - protein, 15 aa, Artificial Sequence
  Description of Artificial Sequence: Synthetic peptide
  Seed: SIGKVCRTLLAKSVF
SILKVIRRLLDKSVF

SEQ ID NO: 268968 - protein, 15 aa, Artificial Sequence
  Description of Artificial Sequence: Synthetic peptide
  Seed: SIGKVCRTLLAKSVF
SILKVIRRLLEKSVF

SEQ ID NO: 268969 - protein, 15 aa, Artificial Sequence
  Description of Artificial Sequence: Synthetic peptide
  Seed: SIGKVCRTLLAKSVF
SILKVIRRLLFKSVF

SEQ ID NO: 268970 - protein, 15 aa, Artificial Sequence
  Description of Artificial Sequence: Synthetic peptide
  Seed: SIGKVCRTLLAKSVF
SILKVIRRLLGKSVF

SEQ ID NO: 268971 - protein, 15 aa, Artificial Sequence
  Description of Artificial Sequence: Synthetic peptide
  Seed: SIGKVCRTLLAKSVF
SILKVIRRLLHKSVF

SEQ ID NO: 268972 - protein, 15 aa, Artificial Sequence
  Description of Artificial Sequence: Synthetic peptide
  Seed: SIGKVCRTLLAKSVF
SILKVIRRLLIKSVF

SEQ ID NO: 268973 - protein, 15 aa, Artificial Sequence
  Description of Artificial Sequence: Synthetic peptide
  Seed: SIGKVCRTLLAKSVF
SILKVIRRLLKKSVF

SEQ ID NO: 268974 - protein, 15 aa, Artificial Sequence
  Description of Artificial Sequence: Synthetic peptide
  Seed: SIGKVCRTLLAKSVF
SILKVIRRLLLKSVF

SEQ ID NO: 268975 - protein, 15 aa, Artificial Sequence
  Description of Artificial Sequence: Synthetic peptide
  Seed: SIGKVCRTLLAKSVF
SILKVIRRLLMKSVF

SEQ ID NO: 268976 - protein, 15 aa, Artificial Sequence
  Description of Artificial Sequence: Synthetic peptide
  Seed: SIGKVCRTLLAKSVF
SILKVIRRLLNKSVF

SEQ ID NO: 268977 - protein, 15 aa, Artificial Sequence
  Description of Artificial Sequence: Synthetic peptide
  Seed: SIGKVCRTLLAKSVF
SILKVIRRLLPKSVF

SEQ ID NO: 268978 - protein, 15 aa, Artificial Sequence
  Description of Artificial Sequence: Synthetic peptide
  Seed: SIGKVCRTLLAKSVF
SILKVIRRLLQKSVF

SEQ ID NO: 268979 - protein, 15 aa, Artificial Sequence
  Description of Artificial Sequence: Synthetic peptide
  Seed: SIGKVCRTLLAKSVF
SILKVIRRLLRKSVF

SEQ ID NO: 268980 - protein, 15 aa, Artificial Sequence
  Description of Artificial Sequence: Synthetic peptide
  Seed: SIGKVCRTLLAKSVF
SILKVIRRLLSKSVF

SEQ ID NO: 268981 - protein, 15 aa, Artificial Sequence
  Description of Artificial Sequence: Synthetic peptide
  Seed: SIGKVCRTLLAKSVF
SILKVIRRLLTKSVF

SEQ ID NO: 268982 - protein, 15 aa, Artificial Sequence
  Description of Artificial Sequence: Synthetic peptide
  Seed: SIGKVCRTLLAKSVF
SILKVIRRLLVKSVF

SEQ ID NO: 268983 - protein, 15 aa, Artificial Sequence
  Description of Artificial Sequence: Synthetic peptide
  Seed: SIGKVCRTLLAKSVF
SILKVIRRLLWKSVF

SEQ ID NO: 268984 - protein, 15 aa, Artificial Sequence
  Description of Artificial Sequence: Synthetic peptide
  Seed: SIGKVCRTLLAKSVF
SILKVIRRLLYKSVF

SEQ ID NO: 268985 - protein, 15 aa, Artificial Sequence
  Description of Artificial Sequence: Synthetic peptide
  Seed: SIGKVCRTLLAKSVF
SILKVIRSLLAKSVF

SEQ ID NO: 268986 - protein, 15 aa, Artificial Sequence
  Description of Artificial Sequence: Synthetic peptide
  Seed: SIGKVCRTLLAKSVF
SILKVIRSLLDKSVF

SEQ ID NO: 268987 - protein, 15 aa, Artificial Sequence
  Description of Artificial Sequence: Synthetic peptide
  Seed: SIGKVCRTLLAKSVF
SILKVIRSLLEKSVF

SEQ ID NO: 268988 - protein, 15 aa, Artificial Sequence
  Description of Artificial Sequence: Synthetic peptide
  Seed: SIGKVCRTLLAKSVF
SILKVIRSLLGKSVF

SEQ ID NO: 268989 - protein, 15 aa, Artificial Sequence
  Description of Artificial Sequence: Synthetic peptide
  Seed: SIGKVCRTLLAKSVF
SILKVIRSLLHKSVF

SEQ ID NO: 268990 - protein, 15 aa, Artificial Sequence
  Description of Artificial Sequence: Synthetic peptide
  Seed: SIGKVCRTLLAKSVF
SILKVIRSLLIKSVF

SEQ ID NO: 268991 - protein, 15 aa, Artificial Sequence
  Description of Artificial Sequence: Synthetic peptide
  Seed: SIGKVCRTLLAKSVF
SILKVIRSLLMKSVF

SEQ ID NO: 268992 - protein, 15 aa, Artificial Sequence
  Description of Artificial Sequence: Synthetic peptide
  Seed: SIGKVCRTLLAKSVF
SILKVIRSLLNKSVF

SEQ ID NO: 268993 - protein, 15 aa, Artificial Sequence
  Description of Artificial Sequence: Synthetic peptide
  Seed: SIGKVCRTLLAKSVF
SILKVIRSLLPKSVF

SEQ ID NO: 268994 - protein, 15 aa, Artificial Sequence
  Description of Artificial Sequence: Synthetic peptide
  Seed: SIGKVCRTLLAKSVF
SILKVIRSLLQKSVF

SEQ ID NO: 268995 - protein, 15 aa, Artificial Sequence
  Description of Artificial Sequence: Synthetic peptide
  Seed: SIGKVCRTLLAKSVF
SILKVIRSLLSKSVF

SEQ ID NO: 268996 - protein, 15 aa, Artificial Sequence
  Description of Artificial Sequence: Synthetic peptide
  Seed: SIGKVCRTLLAKSVF
SILKVIRSLLTKSVF

SEQ ID NO: 268997 - protein, 15 aa, Artificial Sequence
  Description of Artificial Sequence: Synthetic peptide
  Seed: SIGKVCRTLLAKSVF
SILKVIRSLLVKSVF

SEQ ID NO: 268998 - protein, 15 aa, Artificial Sequence
  Description of Artificial Sequence: Synthetic peptide
  Seed: SIGKVCRTLLAKSVF
SILKVIRSLLYKSVF

SEQ ID NO: 268999 - protein, 15 aa, Artificial Sequence
  Description of Artificial Sequence: Synthetic peptide
  Seed: SIGKVCRTLLAKSVF
SILKVIRTLLAKSVF

SEQ ID NO: 269000 - protein, 15 aa, Artificial Sequence
  Description of Artificial Sequence: Synthetic peptide
  Seed: SIGKVCRTLLAKSVF
SILKVIRTLLDKSVF

SEQ ID NO: 269001 - protein, 15 aa, Artificial Sequence
  Description of Artificial Sequence: Synthetic peptide
  Seed: SIGKVCRTLLAKSVF
SILKVIRTLLEKSVF

SEQ ID NO: 269002 - protein, 15 aa, Artificial Sequence
  Description of Artificial Sequence: Synthetic peptide
  Seed: SIGKVCRTLLAKSVF
SILKVIRTLLGKSVF

SEQ ID NO: 269003 - protein, 15 aa, Artificial Sequence
  Description of Artificial Sequence: Synthetic peptide
  Seed: SIGKVCRTLLAKSVF
SILKVIRTLLHKSVF

SEQ ID NO: 269004 - protein, 15 aa, Artificial Sequence
  Description of Artificial Sequence: Synthetic peptide
  Seed: SIGKVCRTLLAKSVF
SILKVIRTLLKKSVF

SEQ ID NO: 269005 - protein, 15 aa, Artificial Sequence
  Description of Artificial Sequence: Synthetic peptide
  Seed: SIGKVCRTLLAKSVF
SILKVIRTLLMKSVF

SEQ ID NO: 269006 - protein, 15 aa, Artificial Sequence
  Description of Artificial Sequence: Synthetic peptide
  Seed: SIGKVCRTLLAKSVF
SILKVIRTLLNKSVF

SEQ ID NO: 269007 - protein, 15 aa, Artificial Sequence
  Description of Artificial Sequence: Synthetic peptide
  Seed: SIGKVCRTLLAKSVF
SILKVIRTLLPKSVF

SEQ ID NO: 269008 - protein, 15 aa, Artificial Sequence
  Description of Artificial Sequence: Synthetic peptide
  Seed: SIGKVCRTLLAKSVF
SILKVIRTLLQKSVF

SEQ ID NO: 269009 - protein, 15 aa, Artificial Sequence
  Description of Artificial Sequence: Synthetic peptide
  Seed: SIGKVCRTLLAKSVF
SILKVIRTLLRKSVF

SEQ ID NO: 269010 - protein, 15 aa, Artificial Sequence
  Description of Artificial Sequence: Synthetic peptide
  Seed: SIGKVCRTLLAKSVF
SILKVIRTLLSKSVF

SEQ ID NO: 269011 - protein, 15 aa, Artificial Sequence
  Description of Artificial Sequence: Synthetic peptide
  Seed: SIGKVCRTLLAKSVF
SILKVIRTLLTKSVF

SEQ ID NO: 269012 - protein, 15 aa, Artificial Sequence
  Description of Artificial Sequence: Synthetic peptide
  Seed: SIGKVCRTLLAKSVF
SILKVIRTLLVKSVF

SEQ ID NO: 269013 - protein, 15 aa, Artificial Sequence
  Description of Artificial Sequence: Synthetic peptide
  Seed: SIGKVCRTLLAKSVF
SILKVIRTLLYKSVF

SEQ ID NO: 269014 - protein, 15 aa, Artificial Sequence
  Description of Artificial Sequence: Synthetic peptide
  Seed: SIGKVCRTLLAKSVF
SILKVIRVLLHKSVF

SEQ ID NO: 269015 - protein, 15 aa, Artificial Sequence
  Description of Artificial Sequence: Synthetic peptide
  Seed: SIGKVCRTLLAKSVF
SILKVIRVLLNKSVF

SEQ ID NO: 269016 - protein, 15 aa, Artificial Sequence
  Description of Artificial Sequence: Synthetic peptide
  Seed: SIGKVCRTLLAKSVF
SILKVIRVLLSKSVF

SEQ ID NO: 269017 - protein, 15 aa, Artificial Sequence
  Description of Artificial Sequence: Synthetic peptide
  Seed: SIGKVCRTLLAKSVF
SILKVKRALLAKSVF

SEQ ID NO: 269018 - protein, 15 aa, Artificial Sequence
  Description of Artificial Sequence: Synthetic peptide
  Seed: SIGKVCRTLLAKSVF
SILKVKRALLGKSVF

SEQ ID NO: 269019 - protein, 15 aa, Artificial Sequence
  Description of Artificial Sequence: Synthetic peptide
  Seed: SIGKVCRTLLAKSVF
SILKVKRALLHKSVF

SEQ ID NO: 269020 - protein, 15 aa, Artificial Sequence
  Description of Artificial Sequence: Synthetic peptide
  Seed: SIGKVCRTLLAKSVF
SILKVKRALLKKSVF

SEQ ID NO: 269021 - protein, 15 aa, Artificial Sequence
  Description of Artificial Sequence: Synthetic peptide
  Seed: SIGKVCRTLLAKSVF
SILKVKRALLQKSVF

SEQ ID NO: 269022 - protein, 15 aa, Artificial Sequence
  Description of Artificial Sequence: Synthetic peptide
  Seed: SIGKVCRTLLAKSVF
SILKVKRALLRKSVF

SEQ ID NO: 269023 - protein, 15 aa, Artificial Sequence
  Description of Artificial Sequence: Synthetic peptide
  Seed: SIGKVCRTLLAKSVF
SILKVKRALLSKSVF

SEQ ID NO: 269024 - protein, 15 aa, Artificial Sequence
  Description of Artificial Sequence: Synthetic peptide
  Seed: SIGKVCRTLLAKSVF
SILKVKRELLAKSVF

SEQ ID NO: 269025 - protein, 15 aa, Artificial Sequence
  Description of Artificial Sequence: Synthetic peptide
  Seed: SIGKVCRTLLAKSVF
SILKVKRELLSKSVF

SEQ ID NO: 269026 - protein, 15 aa, Artificial Sequence
  Description of Artificial Sequence: Synthetic peptide
  Seed: SIGKVCRTLLAKSVF
SILKVKRGLLAKSVF

SEQ ID NO: 269027 - protein, 15 aa, Artificial Sequence
  Description of Artificial Sequence: Synthetic peptide
  Seed: SIGKVCRTLLAKSVF
SILKVKRGLLGKSVF

SEQ ID NO: 269028 - protein, 15 aa, Artificial Sequence
  Description of Artificial Sequence: Synthetic peptide
  Seed: SIGKVCRTLLAKSVF
SILKVKRGLLQKSVF

SEQ ID NO: 269029 - protein, 15 aa, Artificial Sequence
  Description of Artificial Sequence: Synthetic peptide
  Seed: SIGKVCRTLLAKSVF
SILKVKRHLLAKSVF

SEQ ID NO: 269030 - protein, 15 aa, Artificial Sequence
  Description of Artificial Sequence: Synthetic peptide
  Seed: SIGKVCRTLLAKSVF
SILKVKRHLLGKSVF

SEQ ID NO: 269031 - protein, 15 aa, Artificial Sequence
  Description of Artificial Sequence: Synthetic peptide
  Seed: SIGKVCRTLLAKSVF
SILKVKRHLLQKSVF

SEQ ID NO: 269032 - protein, 15 aa, Artificial Sequence
  Description of Artificial Sequence: Synthetic peptide
  Seed: SIGKVCRTLLAKSVF
SILKVKRHLLSKSVF

SEQ ID NO: 269033 - protein, 15 aa, Artificial Sequence
  Description of Artificial Sequence: Synthetic peptide
  Seed: SIGKVCRTLLAKSVF
SILKVKRILLGKSVF

SEQ ID NO: 269034 - protein, 15 aa, Artificial Sequence
  Description of Artificial Sequence: Synthetic peptide
  Seed: SIGKVCRTLLAKSVF
SILKVKRILLQKSVF

SEQ ID NO: 269035 - protein, 15 aa, Artificial Sequence
  Description of Artificial Sequence: Synthetic peptide
  Seed: SIGKVCRTLLAKSVF
SILKVKRILLRKSVF

SEQ ID NO: 269036 - protein, 15 aa, Artificial Sequence
  Description of Artificial Sequence: Synthetic peptide
  Seed: SIGKVCRTLLAKSVF
SILKVKRKLLAKSVF

SEQ ID NO: 269037 - protein, 15 aa, Artificial Sequence
  Description of Artificial Sequence: Synthetic peptide
  Seed: SIGKVCRTLLAKSVF
SILKVKRKLLCKSVF

SEQ ID NO: 269038 - protein, 15 aa, Artificial Sequence
  Description of Artificial Sequence: Synthetic peptide
  Seed: SIGKVCRTLLAKSVF
SILKVKRKLLDKSVF

SEQ ID NO: 269039 - protein, 15 aa, Artificial Sequence
  Description of Artificial Sequence: Synthetic peptide
  Seed: SIGKVCRTLLAKSVF
SILKVKRKLLEKSVF

SEQ ID NO: 269040 - protein, 15 aa, Artificial Sequence
  Description of Artificial Sequence: Synthetic peptide
  Seed: SIGKVCRTLLAKSVF
SILKVKRKLLFKSVF

SEQ ID NO: 269041 - protein, 15 aa, Artificial Sequence
  Description of Artificial Sequence: Synthetic peptide
  Seed: SIGKVCRTLLAKSVF
SILKVKRKLLGKSVF

SEQ ID NO: 269042 - protein, 15 aa, Artificial Sequence
  Description of Artificial Sequence: Synthetic peptide
  Seed: SIGKVCRTLLAKSVF
SILKVKRKLLHKSVF

SEQ ID NO: 269043 - protein, 15 aa, Artificial Sequence
  Description of Artificial Sequence: Synthetic peptide
  Seed: SIGKVCRTLLAKSVF
SILKVKRKLLIKSVF

SEQ ID NO: 269044 - protein, 15 aa, Artificial Sequence
  Description of Artificial Sequence: Synthetic peptide
  Seed: SIGKVCRTLLAKSVF
SILKVKRKLLLKSVF

SEQ ID NO: 269045 - protein, 15 aa, Artificial Sequence
  Description of Artificial Sequence: Synthetic peptide
  Seed: SIGKVCRTLLAKSVF
SILKVKRKLLMKSVF

SEQ ID NO: 269046 - protein, 15 aa, Artificial Sequence
  Description of Artificial Sequence: Synthetic peptide
  Seed: SIGKVCRTLLAKSVF
SILKVKRKLLNKSVF

SEQ ID NO: 269047 - protein, 15 aa, Artificial Sequence
  Description of Artificial Sequence: Synthetic peptide
  Seed: SIGKVCRTLLAKSVF
SILKVKRKLLPKSVF

SEQ ID NO: 269048 - protein, 15 aa, Artificial Sequence
  Description of Artificial Sequence: Synthetic peptide
  Seed: SIGKVCRTLLAKSVF
SILKVKRKLLQKSVF

SEQ ID NO: 269049 - protein, 15 aa, Artificial Sequence
  Description of Artificial Sequence: Synthetic peptide
  Seed: SIGKVCRTLLAKSVF
SILKVKRKLLRKSVF

SEQ ID NO: 269050 - protein, 15 aa, Artificial Sequence
  Description of Artificial Sequence: Synthetic peptide
  Seed: SIGKVCRTLLAKSVF
SILKVKRKLLSKSVF

SEQ ID NO: 269051 - protein, 15 aa, Artificial Sequence
  Description of Artificial Sequence: Synthetic peptide
  Seed: SIGKVCRTLLAKSVF
SILKVKRKLLTKSVF

SEQ ID NO: 269052 - protein, 15 aa, Artificial Sequence
  Description of Artificial Sequence: Synthetic peptide
  Seed: SIGKVCRTLLAKSVF
SILKVKRKLLVKSVF

SEQ ID NO: 269053 - protein, 15 aa, Artificial Sequence
  Description of Artificial Sequence: Synthetic peptide
  Seed: SIGKVCRTLLAKSVF
SILKVKRKLLYKSVF

SEQ ID NO: 269054 - protein, 15 aa, Artificial Sequence
  Description of Artificial Sequence: Synthetic peptide
  Seed: SIGKVCRTLLAKSVF
SILKVKRNLLAKSVF

SEQ ID NO: 269055 - protein, 15 aa, Artificial Sequence
  Description of Artificial Sequence: Synthetic peptide
  Seed: SIGKVCRTLLAKSVF
SILKVKRNLLCKSVF

SEQ ID NO: 269056 - protein, 15 aa, Artificial Sequence
  Description of Artificial Sequence: Synthetic peptide
  Seed: SIGKVCRTLLAKSVF
SILKVKRNLLEKSVF

SEQ ID NO: 269057 - protein, 15 aa, Artificial Sequence
  Description of Artificial Sequence: Synthetic peptide
  Seed: SIGKVCRTLLAKSVF
SILKVKRNLLGKSVF

SEQ ID NO: 269058 - protein, 15 aa, Artificial Sequence
  Description of Artificial Sequence: Synthetic peptide
  Seed: SIGKVCRTLLAKSVF
SILKVKRNLLHKSVF

SEQ ID NO: 269059 - protein, 15 aa, Artificial Sequence
  Description of Artificial Sequence: Synthetic peptide
  Seed: SIGKVCRTLLAKSVF
SILKVKRNLLQKSVF

SEQ ID NO: 269060 - protein, 15 aa, Artificial Sequence
  Description of Artificial Sequence: Synthetic peptide
  Seed: SIGKVCRTLLAKSVF
SILKVKRNLLSKSVF

SEQ ID NO: 269061 - protein, 15 aa, Artificial Sequence
  Description of Artificial Sequence: Synthetic peptide
  Seed: SIGKVCRTLLAKSVF
SILKVKRNLLYKSVF

SEQ ID NO: 269062 - protein, 15 aa, Artificial Sequence
  Description of Artificial Sequence: Synthetic peptide
  Seed: SIGKVCRTLLAKSVF
SILKVKRPLLAKSVF

SEQ ID NO: 269063 - protein, 15 aa, Artificial Sequence
  Description of Artificial Sequence: Synthetic peptide
  Seed: SIGKVCRTLLAKSVF
SILKVKRPLLGKSVF

SEQ ID NO: 269064 - protein, 15 aa, Artificial Sequence
  Description of Artificial Sequence: Synthetic peptide
  Seed: SIGKVCRTLLAKSVF
SILKVKRPLLQKSVF

SEQ ID NO: 269065 - protein, 15 aa, Artificial Sequence
  Description of Artificial Sequence: Synthetic peptide
  Seed: SIGKVCRTLLAKSVF
SILKVKRPLLSKSVF

SEQ ID NO: 269066 - protein, 15 aa, Artificial Sequence
  Description of Artificial Sequence: Synthetic peptide
  Seed: SIGKVCRTLLAKSVF
SILKVKRQLLAKSVF

SEQ ID NO: 269067 - protein, 15 aa, Artificial Sequence
  Description of Artificial Sequence: Synthetic peptide
  Seed: SIGKVCRTLLAKSVF
SILKVKRQLLGKSVF

SEQ ID NO: 269068 - protein, 15 aa, Artificial Sequence
  Description of Artificial Sequence: Synthetic peptide
  Seed: SIGKVCRTLLAKSVF
SILKVKRQLLQKSVF

SEQ ID NO: 269069 - protein, 15 aa, Artificial Sequence
  Description of Artificial Sequence: Synthetic peptide
  Seed: SIGKVCRTLLAKSVF
SILKVKRQLLSKSVF

SEQ ID NO: 269070 - protein, 15 aa, Artificial Sequence
  Description of Artificial Sequence: Synthetic peptide
  Seed: SIGKVCRTLLAKSVF
SILKVKRRLLAKSVF

SEQ ID NO: 269071 - protein, 15 aa, Artificial Sequence
  Description of Artificial Sequence: Synthetic peptide
  Seed: SIGKVCRTLLAKSVF
SILKVKRRLLCKSVF

SEQ ID NO: 269072 - protein, 15 aa, Artificial Sequence
  Description of Artificial Sequence: Synthetic peptide
  Seed: SIGKVCRTLLAKSVF
SILKVKRRLLDKSVF

SEQ ID NO: 269073 - protein, 15 aa, Artificial Sequence
  Description of Artificial Sequence: Synthetic peptide
  Seed: SIGKVCRTLLAKSVF
SILKVKRRLLEKSVF

SEQ ID NO: 269074 - protein, 15 aa, Artificial Sequence
  Description of Artificial Sequence: Synthetic peptide
  Seed: SIGKVCRTLLAKSVF
SILKVKRRLLGKSVF

SEQ ID NO: 269075 - protein, 15 aa, Artificial Sequence
  Description of Artificial Sequence: Synthetic peptide
  Seed: SIGKVCRTLLAKSVF
SILKVKRRLLHKSVF

SEQ ID NO: 269076 - protein, 15 aa, Artificial Sequence
  Description of Artificial Sequence: Synthetic peptide
  Seed: SIGKVCRTLLAKSVF
SILKVKRRLLIKSVF

SEQ ID NO: 269077 - protein, 15 aa, Artificial Sequence
  Description of Artificial Sequence: Synthetic peptide
  Seed: SIGKVCRTLLAKSVF
SILKVKRRLLKKSVF

SEQ ID NO: 269078 - protein, 15 aa, Artificial Sequence
  Description of Artificial Sequence: Synthetic peptide
  Seed: SIGKVCRTLLAKSVF
SILKVKRRLLLKSVF

SEQ ID NO: 269079 - protein, 15 aa, Artificial Sequence
  Description of Artificial Sequence: Synthetic peptide
  Seed: SIGKVCRTLLAKSVF
SILKVKRRLLMKSVF

SEQ ID NO: 269080 - protein, 15 aa, Artificial Sequence
  Description of Artificial Sequence: Synthetic peptide
  Seed: SIGKVCRTLLAKSVF
SILKVKRRLLNKSVF

SEQ ID NO: 269081 - protein, 15 aa, Artificial Sequence
  Description of Artificial Sequence: Synthetic peptide
  Seed: SIGKVCRTLLAKSVF
SILKVKRRLLPKSVF

SEQ ID NO: 269082 - protein, 15 aa, Artificial Sequence
  Description of Artificial Sequence: Synthetic peptide
  Seed: SIGKVCRTLLAKSVF
SILKVKRRLLQKSVF

SEQ ID NO: 269083 - protein, 15 aa, Artificial Sequence
  Description of Artificial Sequence: Synthetic peptide
  Seed: SIGKVCRTLLAKSVF
SILKVKRRLLRKSVF

SEQ ID NO: 269084 - protein, 15 aa, Artificial Sequence
  Description of Artificial Sequence: Synthetic peptide
  Seed: SIGKVCRTLLAKSVF
SILKVKRRLLSKSVF

SEQ ID NO: 269085 - protein, 15 aa, Artificial Sequence
  Description of Artificial Sequence: Synthetic peptide
  Seed: SIGKVCRTLLAKSVF
SILKVKRRLLTKSVF

SEQ ID NO: 269086 - protein, 15 aa, Artificial Sequence
  Description of Artificial Sequence: Synthetic peptide
  Seed: SIGKVCRTLLAKSVF
SILKVKRRLLVKSVF

SEQ ID NO: 269087 - protein, 15 aa, Artificial Sequence
  Description of Artificial Sequence: Synthetic peptide
  Seed: SIGKVCRTLLAKSVF
SILKVKRRLLYKSVF

SEQ ID NO: 269088 - protein, 15 aa, Artificial Sequence
  Description of Artificial Sequence: Synthetic peptide
  Seed: SIGKVCRTLLAKSVF
SILKVKRSLLAKSVF

SEQ ID NO: 269089 - protein, 15 aa, Artificial Sequence
  Description of Artificial Sequence: Synthetic peptide
  Seed: SIGKVCRTLLAKSVF
SILKVKRSLLCKSVF

SEQ ID NO: 269090 - protein, 15 aa, Artificial Sequence
  Description of Artificial Sequence: Synthetic peptide
  Seed: SIGKVCRTLLAKSVF
SILKVKRSLLDKSVF

SEQ ID NO: 269091 - protein, 15 aa, Artificial Sequence
  Description of Artificial Sequence: Synthetic peptide
  Seed: SIGKVCRTLLAKSVF
SILKVKRSLLEKSVF

SEQ ID NO: 269092 - protein, 15 aa, Artificial Sequence
  Description of Artificial Sequence: Synthetic peptide
  Seed: SIGKVCRTLLAKSVF
SILKVKRSLLGKSVF

SEQ ID NO: 269093 - protein, 15 aa, Artificial Sequence
  Description of Artificial Sequence: Synthetic peptide
  Seed: SIGKVCRTLLAKSVF
SILKVKRSLLHKSVF

SEQ ID NO: 269094 - protein, 15 aa, Artificial Sequence
  Description of Artificial Sequence: Synthetic peptide
  Seed: SIGKVCRTLLAKSVF
SILKVKRSLLMKSVF

SEQ ID NO: 269095 - protein, 15 aa, Artificial Sequence
  Description of Artificial Sequence: Synthetic peptide
  Seed: SIGKVCRTLLAKSVF
SILKVKRSLLNKSVF

SEQ ID NO: 269096 - protein, 15 aa, Artificial Sequence
  Description of Artificial Sequence: Synthetic peptide
  Seed: SIGKVCRTLLAKSVF
SILKVKRSLLQKSVF

SEQ ID NO: 269097 - protein, 15 aa, Artificial Sequence
  Description of Artificial Sequence: Synthetic peptide
  Seed: SIGKVCRTLLAKSVF
SILKVKRSLLRKSVF

SEQ ID NO: 269098 - protein, 15 aa, Artificial Sequence
  Description of Artificial Sequence: Synthetic peptide
  Seed: SIGKVCRTLLAKSVF
SILKVKRSLLSKSVF

SEQ ID NO: 269099 - protein, 15 aa, Artificial Sequence
  Description of Artificial Sequence: Synthetic peptide
  Seed: SIGKVCRTLLAKSVF
SILKVKRSLLTKSVF

SEQ ID NO: 269100 - protein, 15 aa, Artificial Sequence
  Description of Artificial Sequence: Synthetic peptide
  Seed: SIGKVCRTLLAKSVF
SILKVKRSLLVKSVF

SEQ ID NO: 269101 - protein, 15 aa, Artificial Sequence
  Description of Artificial Sequence: Synthetic peptide
  Seed: SIGKVCRTLLAKSVF
SILKVKRSLLYKSVF

SEQ ID NO: 269102 - protein, 15 aa, Artificial Sequence
  Description of Artificial Sequence: Synthetic peptide
  Seed: SIGKVCRTLLAKSVF
SILKVKRTLLAKSVF

SEQ ID NO: 269103 - protein, 15 aa, Artificial Sequence
  Description of Artificial Sequence: Synthetic peptide
  Seed: SIGKVCRTLLAKSVF
SILKVKRTLLCKSVF

SEQ ID NO: 269104 - protein, 15 aa, Artificial Sequence
  Description of Artificial Sequence: Synthetic peptide
  Seed: SIGKVCRTLLAKSVF
SILKVKRTLLDKSVF

SEQ ID NO: 269105 - protein, 15 aa, Artificial Sequence
  Description of Artificial Sequence: Synthetic peptide
  Seed: SIGKVCRTLLAKSVF
SILKVKRTLLEKSVF

SEQ ID NO: 269106 - protein, 15 aa, Artificial Sequence
  Description of Artificial Sequence: Synthetic peptide
  Seed: SIGKVCRTLLAKSVF
SILKVKRTLLFKSVF

SEQ ID NO: 269107 - protein, 15 aa, Artificial Sequence
  Description of Artificial Sequence: Synthetic peptide
  Seed: SIGKVCRTLLAKSVF
SILKVKRTLLGKSVF

SEQ ID NO: 269108 - protein, 15 aa, Artificial Sequence
  Description of Artificial Sequence: Synthetic peptide
  Seed: SIGKVCRTLLAKSVF
SILKVKRTLLHKSVF

SEQ ID NO: 269109 - protein, 15 aa, Artificial Sequence
  Description of Artificial Sequence: Synthetic peptide
  Seed: SIGKVCRTLLAKSVF
SILKVKRTLLIKSVF

SEQ ID NO: 269110 - protein, 15 aa, Artificial Sequence
  Description of Artificial Sequence: Synthetic peptide
  Seed: SIGKVCRTLLAKSVF
SILKVKRTLLKKSVF

SEQ ID NO: 269111 - protein, 15 aa, Artificial Sequence
  Description of Artificial Sequence: Synthetic peptide
  Seed: SIGKVCRTLLAKSVF
SILKVKRTLLLKSVF

SEQ ID NO: 269112 - protein, 15 aa, Artificial Sequence
  Description of Artificial Sequence: Synthetic peptide
  Seed: SIGKVCRTLLAKSVF
SILKVKRTLLMKSVF

SEQ ID NO: 269113 - protein, 15 aa, Artificial Sequence
  Description of Artificial Sequence: Synthetic peptide
  Seed: SIGKVCRTLLAKSVF
SILKVKRTLLNKSVF

SEQ ID NO: 269114 - protein, 15 aa, Artificial Sequence
  Description of Artificial Sequence: Synthetic peptide
  Seed: SIGKVCRTLLAKSVF
SILKVKRTLLQKSVF

SEQ ID NO: 269115 - protein, 15 aa, Artificial Sequence
  Description of Artificial Sequence: Synthetic peptide
  Seed: SIGKVCRTLLAKSVF
SILKVKRTLLRKSVF

SEQ ID NO: 269116 - protein, 15 aa, Artificial Sequence
  Description of Artificial Sequence: Synthetic peptide
  Seed: SIGKVCRTLLAKSVF
SILKVKRTLLSKSVF

SEQ ID NO: 269117 - protein, 15 aa, Artificial Sequence
  Description of Artificial Sequence: Synthetic peptide
  Seed: SIGKVCRTLLAKSVF
SILKVKRTLLTKSVF

SEQ ID NO: 269118 - protein, 15 aa, Artificial Sequence
  Description of Artificial Sequence: Synthetic peptide
  Seed: SIGKVCRTLLAKSVF
SILKVKRTLLVKSVF

SEQ ID NO: 269119 - protein, 15 aa, Artificial Sequence
  Description of Artificial Sequence: Synthetic peptide
  Seed: SIGKVCRTLLAKSVF
SILKVKRTLLYKSVF

SEQ ID NO: 269120 - protein, 15 aa, Artificial Sequence
  Description of Artificial Sequence: Synthetic peptide
  Seed: SIGKVCRTLLAKSVF
SILKVKRVLLAKSVF

SEQ ID NO: 269121 - protein, 15 aa, Artificial Sequence
  Description of Artificial Sequence: Synthetic peptide
  Seed: SIGKVCRTLLAKSVF
SILKVKRVLLDKSVF

SEQ ID NO: 269122 - protein, 15 aa, Artificial Sequence
  Description of Artificial Sequence: Synthetic peptide
  Seed: SIGKVCRTLLAKSVF
SILKVKRVLLEKSVF

SEQ ID NO: 269123 - protein, 15 aa, Artificial Sequence
  Description of Artificial Sequence: Synthetic peptide
  Seed: SIGKVCRTLLAKSVF
SILKVKRVLLGKSVF

SEQ ID NO: 269124 - protein, 15 aa, Artificial Sequence
  Description of Artificial Sequence: Synthetic peptide
  Seed: SIGKVCRTLLAKSVF
SILKVKRVLLHKSVF

SEQ ID NO: 269125 - protein, 15 aa, Artificial Sequence
  Description of Artificial Sequence: Synthetic peptide
  Seed: SIGKVCRTLLAKSVF
SILKVKRVLLQKSVF

SEQ ID NO: 269126 - protein, 15 aa, Artificial Sequence
  Description of Artificial Sequence: Synthetic peptide
  Seed: SIGKVCRTLLAKSVF
SILKVKRVLLRKSVF

SEQ ID NO: 269127 - protein, 15 aa, Artificial Sequence
  Description of Artificial Sequence: Synthetic peptide
  Seed: SIGKVCRTLLAKSVF
SILKVKRVLLSKSVF

SEQ ID NO: 269128 - protein, 15 aa, Artificial Sequence
  Description of Artificial Sequence: Synthetic peptide
  Seed: SIGKVCRTLLAKSVF
SILKVKRVLLYKSVF

SEQ ID NO: 269129 - protein, 15 aa, Artificial Sequence
  Description of Artificial Sequence: Synthetic peptide
  Seed: SIGKVCRTLLAKSVF
SILKVLRALLAKSVF

SEQ ID NO: 269130 - protein, 15 aa, Artificial Sequence
  Description of Artificial Sequence: Synthetic peptide
  Seed: SIGKVCRTLLAKSVF
SILKVLRALLGKSVF

SEQ ID NO: 269131 - protein, 15 aa, Artificial Sequence
  Description of Artificial Sequence: Synthetic peptide
  Seed: SIGKVCRTLLAKSVF
SILKVLRALLHKSVF

SEQ ID NO: 269132 - protein, 15 aa, Artificial Sequence
  Description of Artificial Sequence: Synthetic peptide
  Seed: SIGKVCRTLLAKSVF
SILKVLRALLNKSVF

SEQ ID NO: 269133 - protein, 15 aa, Artificial Sequence
  Description of Artificial Sequence: Synthetic peptide
  Seed: SIGKVCRTLLAKSVF
SILKVLRALLPKSVF

SEQ ID NO: 269134 - protein, 15 aa, Artificial Sequence
  Description of Artificial Sequence: Synthetic peptide
  Seed: SIGKVCRTLLAKSVF
SILKVLRALLQKSVF

SEQ ID NO: 269135 - protein, 15 aa, Artificial Sequence
  Description of Artificial Sequence: Synthetic peptide
  Seed: SIGKVCRTLLAKSVF
SILKVLRALLSKSVF

SEQ ID NO: 269136 - protein, 15 aa, Artificial Sequence
  Description of Artificial Sequence: Synthetic peptide
  Seed: SIGKVCRTLLAKSVF
SILKVLRALLTKSVF

SEQ ID NO: 269137 - protein, 15 aa, Artificial Sequence
  Description of Artificial Sequence: Synthetic peptide
  Seed: SIGKVCRTLLAKSVF
SILKVLRALLYKSVF

SEQ ID NO: 269138 - protein, 15 aa, Artificial Sequence
  Description of Artificial Sequence: Synthetic peptide
  Seed: SIGKVCRTLLAKSVF
SILKVLRDLLAKSVF

SEQ ID NO: 269139 - protein, 15 aa, Artificial Sequence
  Description of Artificial Sequence: Synthetic peptide
  Seed: SIGKVCRTLLAKSVF
SILKVLRDLLSKSVF

SEQ ID NO: 269140 - protein, 15 aa, Artificial Sequence
  Description of Artificial Sequence: Synthetic peptide
  Seed: SIGKVCRTLLAKSVF
SILKVLRELLKKSVF

SEQ ID NO: 269141 - protein, 15 aa, Artificial Sequence
  Description of Artificial Sequence: Synthetic peptide
  Seed: SIGKVCRTLLAKSVF
SILKVLRELLRKSVF

SEQ ID NO: 269142 - protein, 15 aa, Artificial Sequence
  Description of Artificial Sequence: Synthetic peptide
  Seed: SIGKVCRTLLAKSVF
SILKVLRELLSKSVF

SEQ ID NO: 269143 - protein, 15 aa, Artificial Sequence
  Description of Artificial Sequence: Synthetic peptide
  Seed: SIGKVCRTLLAKSVF
SILKVLRGLLAKSVF

SEQ ID NO: 269144 - protein, 15 aa, Artificial Sequence
  Description of Artificial Sequence: Synthetic peptide
  Seed: SIGKVCRTLLAKSVF
SILKVLRGLLGKSVF

SEQ ID NO: 269145 - protein, 15 aa, Artificial Sequence
  Description of Artificial Sequence: Synthetic peptide
  Seed: SIGKVCRTLLAKSVF
SILKVLRGLLHKSVF

SEQ ID NO: 269146 - protein, 15 aa, Artificial Sequence
  Description of Artificial Sequence: Synthetic peptide
  Seed: SIGKVCRTLLAKSVF
SILKVLRGLLMKSVF

SEQ ID NO: 269147 - protein, 15 aa, Artificial Sequence
  Description of Artificial Sequence: Synthetic peptide
  Seed: SIGKVCRTLLAKSVF
SILKVLRGLLNKSVF

SEQ ID NO: 269148 - protein, 15 aa, Artificial Sequence
  Description of Artificial Sequence: Synthetic peptide
  Seed: SIGKVCRTLLAKSVF
SILKVLRGLLQKSVF

SEQ ID NO: 269149 - protein, 15 aa, Artificial Sequence
  Description of Artificial Sequence: Synthetic peptide
  Seed: SIGKVCRTLLAKSVF
SILKVLRGLLSKSVF

SEQ ID NO: 269150 - protein, 15 aa, Artificial Sequence
  Description of Artificial Sequence: Synthetic peptide
  Seed: SIGKVCRTLLAKSVF
SILKVLRGLLTKSVF

SEQ ID NO: 269151 - protein, 15 aa, Artificial Sequence
  Description of Artificial Sequence: Synthetic peptide
  Seed: SIGKVCRTLLAKSVF
SILKVLRGLLVKSVF

SEQ ID NO: 269152 - protein, 15 aa, Artificial Sequence
  Description of Artificial Sequence: Synthetic peptide
  Seed: SIGKVCRTLLAKSVF
SILKVLRGLLYKSVF

SEQ ID NO: 269153 - protein, 15 aa, Artificial Sequence
  Description of Artificial Sequence: Synthetic peptide
  Seed: SIGKVCRTLLAKSVF
SILKVLRHLLAKSVF

SEQ ID NO: 269154 - protein, 15 aa, Artificial Sequence
  Description of Artificial Sequence: Synthetic peptide
  Seed: SIGKVCRTLLAKSVF
SILKVLRHLLDKSVF

SEQ ID NO: 269155 - protein, 15 aa, Artificial Sequence
  Description of Artificial Sequence: Synthetic peptide
  Seed: SIGKVCRTLLAKSVF
SILKVLRHLLEKSVF

SEQ ID NO: 269156 - protein, 15 aa, Artificial Sequence
  Description of Artificial Sequence: Synthetic peptide
  Seed: SIGKVCRTLLAKSVF
SILKVLRHLLGKSVF

SEQ ID NO: 269157 - protein, 15 aa, Artificial Sequence
  Description of Artificial Sequence: Synthetic peptide
  Seed: SIGKVCRTLLAKSVF
SILKVLRHLLHKSVF

SEQ ID NO: 269158 - protein, 15 aa, Artificial Sequence
  Description of Artificial Sequence: Synthetic peptide
  Seed: SIGKVCRTLLAKSVF
SILKVLRHLLIKSVF

SEQ ID NO: 269159 - protein, 15 aa, Artificial Sequence
  Description of Artificial Sequence: Synthetic peptide
  Seed: SIGKVCRTLLAKSVF
SILKVLRHLLKKSVF

SEQ ID NO: 269160 - protein, 15 aa, Artificial Sequence
  Description of Artificial Sequence: Synthetic peptide
  Seed: SIGKVCRTLLAKSVF
SILKVLRHLLLKSVF

SEQ ID NO: 269161 - protein, 15 aa, Artificial Sequence
  Description of Artificial Sequence: Synthetic peptide
  Seed: SIGKVCRTLLAKSVF
SILKVLRHLLMKSVF

SEQ ID NO: 269162 - protein, 15 aa, Artificial Sequence
  Description of Artificial Sequence: Synthetic peptide
  Seed: SIGKVCRTLLAKSVF
SILKVLRHLLNKSVF

SEQ ID NO: 269163 - protein, 15 aa, Artificial Sequence
  Description of Artificial Sequence: Synthetic peptide
  Seed: SIGKVCRTLLAKSVF
SILKVLRHLLPKSVF

SEQ ID NO: 269164 - protein, 15 aa, Artificial Sequence
  Description of Artificial Sequence: Synthetic peptide
  Seed: SIGKVCRTLLAKSVF
SILKVLRHLLQKSVF

SEQ ID NO: 269165 - protein, 15 aa, Artificial Sequence
  Description of Artificial Sequence: Synthetic peptide
  Seed: SIGKVCRTLLAKSVF
SILKVLRHLLRKSVF

SEQ ID NO: 269166 - protein, 15 aa, Artificial Sequence
  Description of Artificial Sequence: Synthetic peptide
  Seed: SIGKVCRTLLAKSVF
SILKVLRHLLSKSVF

SEQ ID NO: 269167 - protein, 15 aa, Artificial Sequence
  Description of Artificial Sequence: Synthetic peptide
  Seed: SIGKVCRTLLAKSVF
SILKVLRHLLTKSVF

SEQ ID NO: 269168 - protein, 15 aa, Artificial Sequence
  Description of Artificial Sequence: Synthetic peptide
  Seed: SIGKVCRTLLAKSVF
SILKVLRHLLVKSVF

SEQ ID NO: 269169 - protein, 15 aa, Artificial Sequence
  Description of Artificial Sequence: Synthetic peptide
  Seed: SIGKVCRTLLAKSVF
SILKVLRHLLYKSVF

SEQ ID NO: 269170 - protein, 15 aa, Artificial Sequence
  Description of Artificial Sequence: Synthetic peptide
  Seed: SIGKVCRTLLAKSVF
SILKVLRILLHKSVF

SEQ ID NO: 269171 - protein, 15 aa, Artificial Sequence
  Description of Artificial Sequence: Synthetic peptide
  Seed: SIGKVCRTLLAKSVF
SILKVLRKLLAKSVF

SEQ ID NO: 269172 - protein, 15 aa, Artificial Sequence
  Description of Artificial Sequence: Synthetic peptide
  Seed: SIGKVCRTLLAKSVF
SILKVLRKLLCKSVF

SEQ ID NO: 269173 - protein, 15 aa, Artificial Sequence
  Description of Artificial Sequence: Synthetic peptide
  Seed: SIGKVCRTLLAKSVF
SILKVLRKLLDKSVF

SEQ ID NO: 269174 - protein, 15 aa, Artificial Sequence
  Description of Artificial Sequence: Synthetic peptide
  Seed: SIGKVCRTLLAKSVF
SILKVLRKLLEKSVF

SEQ ID NO: 269175 - protein, 15 aa, Artificial Sequence
  Description of Artificial Sequence: Synthetic peptide
  Seed: SIGKVCRTLLAKSVF
SILKVLRKLLFKSVF

SEQ ID NO: 269176 - protein, 15 aa, Artificial Sequence
  Description of Artificial Sequence: Synthetic peptide
  Seed: SIGKVCRTLLAKSVF
SILKVLRKLLGKSVF

SEQ ID NO: 269177 - protein, 15 aa, Artificial Sequence
  Description of Artificial Sequence: Synthetic peptide
  Seed: SIGKVCRTLLAKSVF
SILKVLRKLLHKSVF

SEQ ID NO: 269178 - protein, 15 aa, Artificial Sequence
  Description of Artificial Sequence: Synthetic peptide
  Seed: SIGKVCRTLLAKSVF
SILKVLRKLLIKSVF

SEQ ID NO: 269179 - protein, 15 aa, Artificial Sequence
  Description of Artificial Sequence: Synthetic peptide
  Seed: SIGKVCRTLLAKSVF
SILKVLRKLLKKSVF

SEQ ID NO: 269180 - protein, 15 aa, Artificial Sequence
  Description of Artificial Sequence: Synthetic peptide
  Seed: SIGKVCRTLLAKSVF
SILKVLRKLLLKSVF

SEQ ID NO: 269181 - protein, 15 aa, Artificial Sequence
  Description of Artificial Sequence: Synthetic peptide
  Seed: SIGKVCRTLLAKSVF
SILKVLRKLLMKSVF

SEQ ID NO: 269182 - protein, 15 aa, Artificial Sequence
  Description of Artificial Sequence: Synthetic peptide
  Seed: SIGKVCRTLLAKSVF
SILKVLRKLLNKSVF

SEQ ID NO: 269183 - protein, 15 aa, Artificial Sequence
  Description of Artificial Sequence: Synthetic peptide
  Seed: SIGKVCRTLLAKSVF
SILKVLRKLLPKSVF

SEQ ID NO: 269184 - protein, 15 aa, Artificial Sequence
  Description of Artificial Sequence: Synthetic peptide
  Seed: SIGKVCRTLLAKSVF
SILKVLRKLLQKSVF

SEQ ID NO: 269185 - protein, 15 aa, Artificial Sequence
  Description of Artificial Sequence: Synthetic peptide
  Seed: SIGKVCRTLLAKSVF
SILKVLRKLLRKSVF

SEQ ID NO: 269186 - protein, 15 aa, Artificial Sequence
  Description of Artificial Sequence: Synthetic peptide
  Seed: SIGKVCRTLLAKSVF
SILKVLRKLLSKSVF

SEQ ID NO: 269187 - protein, 15 aa, Artificial Sequence
  Description of Artificial Sequence: Synthetic peptide
  Seed: SIGKVCRTLLAKSVF
SILKVLRKLLTKSVF

SEQ ID NO: 269188 - protein, 15 aa, Artificial Sequence
  Description of Artificial Sequence: Synthetic peptide
  Seed: SIGKVCRTLLAKSVF
SILKVLRKLLVKSVF

SEQ ID NO: 269189 - protein, 15 aa, Artificial Sequence
  Description of Artificial Sequence: Synthetic peptide
  Seed: SIGKVCRTLLAKSVF
SILKVLRKLLWKSVF

SEQ ID NO: 269190 - protein, 15 aa, Artificial Sequence
  Description of Artificial Sequence: Synthetic peptide
  Seed: SIGKVCRTLLAKSVF
SILKVLRKLLYKSVF

SEQ ID NO: 269191 - protein, 15 aa, Artificial Sequence
  Description of Artificial Sequence: Synthetic peptide
  Seed: SIGKVCRTLLAKSVF
SILKVLRLLLHKSVF

SEQ ID NO: 269192 - protein, 15 aa, Artificial Sequence
  Description of Artificial Sequence: Synthetic peptide
  Seed: SIGKVCRTLLAKSVF
SILKVLRNLLAKSVF

SEQ ID NO: 269193 - protein, 15 aa, Artificial Sequence
  Description of Artificial Sequence: Synthetic peptide
  Seed: SIGKVCRTLLAKSVF
SILKVLRNLLDKSVF

SEQ ID NO: 269194 - protein, 15 aa, Artificial Sequence
  Description of Artificial Sequence: Synthetic peptide
  Seed: SIGKVCRTLLAKSVF
SILKVLRNLLEKSVF

SEQ ID NO: 269195 - protein, 15 aa, Artificial Sequence
  Description of Artificial Sequence: Synthetic peptide
  Seed: SIGKVCRTLLAKSVF
SILKVLRNLLGKSVF

SEQ ID NO: 269196 - protein, 15 aa, Artificial Sequence
  Description of Artificial Sequence: Synthetic peptide
  Seed: SIGKVCRTLLAKSVF
SILKVLRNLLHKSVF

SEQ ID NO: 269197 - protein, 15 aa, Artificial Sequence
  Description of Artificial Sequence: Synthetic peptide
  Seed: SIGKVCRTLLAKSVF
SILKVLRNLLMKSVF

SEQ ID NO: 269198 - protein, 15 aa, Artificial Sequence
  Description of Artificial Sequence: Synthetic peptide
  Seed: SIGKVCRTLLAKSVF
SILKVLRNLLNKSVF

SEQ ID NO: 269199 - protein, 15 aa, Artificial Sequence
  Description of Artificial Sequence: Synthetic peptide
  Seed: SIGKVCRTLLAKSVF
SILKVLRNLLPKSVF

SEQ ID NO: 269200 - protein, 15 aa, Artificial Sequence
  Description of Artificial Sequence: Synthetic peptide
  Seed: SIGKVCRTLLAKSVF
SILKVLRNLLQKSVF

SEQ ID NO: 269201 - protein, 15 aa, Artificial Sequence
  Description of Artificial Sequence: Synthetic peptide
  Seed: SIGKVCRTLLAKSVF
SILKVLRNLLRKSVF

SEQ ID NO: 269202 - protein, 15 aa, Artificial Sequence
  Description of Artificial Sequence: Synthetic peptide
  Seed: SIGKVCRTLLAKSVF
SILKVLRNLLSKSVF

SEQ ID NO: 269203 - protein, 15 aa, Artificial Sequence
  Description of Artificial Sequence: Synthetic peptide
  Seed: SIGKVCRTLLAKSVF
SILKVLRNLLTKSVF

SEQ ID NO: 269204 - protein, 15 aa, Artificial Sequence
  Description of Artificial Sequence: Synthetic peptide
  Seed: SIGKVCRTLLAKSVF
SILKVLRNLLVKSVF

SEQ ID NO: 269205 - protein, 15 aa, Artificial Sequence
  Description of Artificial Sequence: Synthetic peptide
  Seed: SIGKVCRTLLAKSVF
SILKVLRNLLYKSVF

SEQ ID NO: 269206 - protein, 15 aa, Artificial Sequence
  Description of Artificial Sequence: Synthetic peptide
  Seed: SIGKVCRTLLAKSVF
SILKVLRPLLAKSVF

SEQ ID NO: 269207 - protein, 15 aa, Artificial Sequence
  Description of Artificial Sequence: Synthetic peptide
  Seed: SIGKVCRTLLAKSVF
SILKVLRPLLDKSVF

SEQ ID NO: 269208 - protein, 15 aa, Artificial Sequence
  Description of Artificial Sequence: Synthetic peptide
  Seed: SIGKVCRTLLAKSVF
SILKVLRPLLEKSVF

SEQ ID NO: 269209 - protein, 15 aa, Artificial Sequence
  Description of Artificial Sequence: Synthetic peptide
  Seed: SIGKVCRTLLAKSVF
SILKVLRPLLGKSVF

SEQ ID NO: 269210 - protein, 15 aa, Artificial Sequence
  Description of Artificial Sequence: Synthetic peptide
  Seed: SIGKVCRTLLAKSVF
SILKVLRPLLHKSVF

SEQ ID NO: 269211 - protein, 15 aa, Artificial Sequence
  Description of Artificial Sequence: Synthetic peptide
  Seed: SIGKVCRTLLAKSVF
SILKVLRPLLIKSVF

SEQ ID NO: 269212 - protein, 15 aa, Artificial Sequence
  Description of Artificial Sequence: Synthetic peptide
  Seed: SIGKVCRTLLAKSVF
SILKVLRPLLLKSVF

SEQ ID NO: 269213 - protein, 15 aa, Artificial Sequence
  Description of Artificial Sequence: Synthetic peptide
  Seed: SIGKVCRTLLAKSVF
SILKVLRPLLMKSVF

SEQ ID NO: 269214 - protein, 15 aa, Artificial Sequence
  Description of Artificial Sequence: Synthetic peptide
  Seed: SIGKVCRTLLAKSVF
SILKVLRPLLNKSVF

SEQ ID NO: 269215 - protein, 15 aa, Artificial Sequence
  Description of Artificial Sequence: Synthetic peptide
  Seed: SIGKVCRTLLAKSVF
SILKVLRPLLPKSVF

SEQ ID NO: 269216 - protein, 15 aa, Artificial Sequence
  Description of Artificial Sequence: Synthetic peptide
  Seed: SIGKVCRTLLAKSVF
SILKVLRPLLQKSVF

SEQ ID NO: 269217 - protein, 15 aa, Artificial Sequence
  Description of Artificial Sequence: Synthetic peptide
  Seed: SIGKVCRTLLAKSVF
SILKVLRPLLSKSVF

SEQ ID NO: 269218 - protein, 15 aa, Artificial Sequence
  Description of Artificial Sequence: Synthetic peptide
  Seed: SIGKVCRTLLAKSVF
SILKVLRPLLTKSVF

SEQ ID NO: 269219 - protein, 15 aa, Artificial Sequence
  Description of Artificial Sequence: Synthetic peptide
  Seed: SIGKVCRTLLAKSVF
SILKVLRPLLVKSVF

SEQ ID NO: 269220 - protein, 15 aa, Artificial Sequence
  Description of Artificial Sequence: Synthetic peptide
  Seed: SIGKVCRTLLAKSVF
SILKVLRPLLYKSVF

SEQ ID NO: 269221 - protein, 15 aa, Artificial Sequence
  Description of Artificial Sequence: Synthetic peptide
  Seed: SIGKVCRTLLAKSVF
SILKVLRQLLAKSVF

SEQ ID NO: 269222 - protein, 15 aa, Artificial Sequence
  Description of Artificial Sequence: Synthetic peptide
  Seed: SIGKVCRTLLAKSVF
SILKVLRQLLGKSVF

SEQ ID NO: 269223 - protein, 15 aa, Artificial Sequence
  Description of Artificial Sequence: Synthetic peptide
  Seed: SIGKVCRTLLAKSVF
SILKVLRQLLHKSVF

SEQ ID NO: 269224 - protein, 15 aa, Artificial Sequence
  Description of Artificial Sequence: Synthetic peptide
  Seed: SIGKVCRTLLAKSVF
SILKVLRQLLNKSVF

SEQ ID NO: 269225 - protein, 15 aa, Artificial Sequence
  Description of Artificial Sequence: Synthetic peptide
  Seed: SIGKVCRTLLAKSVF
SILKVLRQLLQKSVF

SEQ ID NO: 269226 - protein, 15 aa, Artificial Sequence
  Description of Artificial Sequence: Synthetic peptide
  Seed: SIGKVCRTLLAKSVF
SILKVLRQLLSKSVF

SEQ ID NO: 269227 - protein, 15 aa, Artificial Sequence
  Description of Artificial Sequence: Synthetic peptide
  Seed: SIGKVCRTLLAKSVF
SILKVLRQLLTKSVF

SEQ ID NO: 269228 - protein, 15 aa, Artificial Sequence
  Description of Artificial Sequence: Synthetic peptide
  Seed: SIGKVCRTLLAKSVF
SILKVLRRLLAKSVF

SEQ ID NO: 269229 - protein, 15 aa, Artificial Sequence
  Description of Artificial Sequence: Synthetic peptide
  Seed: SIGKVCRTLLAKSVF
SILKVLRRLLCKSVF

SEQ ID NO: 269230 - protein, 15 aa, Artificial Sequence
  Description of Artificial Sequence: Synthetic peptide
  Seed: SIGKVCRTLLAKSVF
SILKVLRRLLDKSVF

SEQ ID NO: 269231 - protein, 15 aa, Artificial Sequence
  Description of Artificial Sequence: Synthetic peptide
  Seed: SIGKVCRTLLAKSVF
SILKVLRRLLEKSVF

SEQ ID NO: 269232 - protein, 15 aa, Artificial Sequence
  Description of Artificial Sequence: Synthetic peptide
  Seed: SIGKVCRTLLAKSVF
SILKVLRRLLFKSVF

SEQ ID NO: 269233 - protein, 15 aa, Artificial Sequence
  Description of Artificial Sequence: Synthetic peptide
  Seed: SIGKVCRTLLAKSVF
SILKVLRRLLGKSVF

SEQ ID NO: 269234 - protein, 15 aa, Artificial Sequence
  Description of Artificial Sequence: Synthetic peptide
  Seed: SIGKVCRTLLAKSVF
SILKVLRRLLHKSVF

SEQ ID NO: 269235 - protein, 15 aa, Artificial Sequence
  Description of Artificial Sequence: Synthetic peptide
  Seed: SIGKVCRTLLAKSVF
SILKVLRRLLIKSVF

SEQ ID NO: 269236 - protein, 15 aa, Artificial Sequence
  Description of Artificial Sequence: Synthetic peptide
  Seed: SIGKVCRTLLAKSVF
SILKVLRRLLKKSVF

SEQ ID NO: 269237 - protein, 15 aa, Artificial Sequence
  Description of Artificial Sequence: Synthetic peptide
  Seed: SIGKVCRTLLAKSVF
SILKVLRRLLLKSVF

SEQ ID NO: 269238 - protein, 15 aa, Artificial Sequence
  Description of Artificial Sequence: Synthetic peptide
  Seed: SIGKVCRTLLAKSVF
SILKVLRRLLMKSVF

SEQ ID NO: 269239 - protein, 15 aa, Artificial Sequence
  Description of Artificial Sequence: Synthetic peptide
  Seed: SIGKVCRTLLAKSVF
SILKVLRRLLNKSVF

SEQ ID NO: 269240 - protein, 15 aa, Artificial Sequence
  Description of Artificial Sequence: Synthetic peptide
  Seed: SIGKVCRTLLAKSVF
SILKVLRRLLPKSVF

SEQ ID NO: 269241 - protein, 15 aa, Artificial Sequence
  Description of Artificial Sequence: Synthetic peptide
  Seed: SIGKVCRTLLAKSVF
SILKVLRRLLQKSVF

SEQ ID NO: 269242 - protein, 15 aa, Artificial Sequence
  Description of Artificial Sequence: Synthetic peptide
  Seed: SIGKVCRTLLAKSVF
SILKVLRRLLRKSVF

SEQ ID NO: 269243 - protein, 15 aa, Artificial Sequence
  Description of Artificial Sequence: Synthetic peptide
  Seed: SIGKVCRTLLAKSVF
SILKVLRRLLSKSVF

SEQ ID NO: 269244 - protein, 15 aa, Artificial Sequence
  Description of Artificial Sequence: Synthetic peptide
  Seed: SIGKVCRTLLAKSVF
SILKVLRRLLTKSVF

SEQ ID NO: 269245 - protein, 15 aa, Artificial Sequence
  Description of Artificial Sequence: Synthetic peptide
  Seed: SIGKVCRTLLAKSVF
SILKVLRRLLVKSVF

SEQ ID NO: 269246 - protein, 15 aa, Artificial Sequence
  Description of Artificial Sequence: Synthetic peptide
  Seed: SIGKVCRTLLAKSVF
SILKVLRRLLWKSVF

SEQ ID NO: 269247 - protein, 15 aa, Artificial Sequence
  Description of Artificial Sequence: Synthetic peptide
  Seed: SIGKVCRTLLAKSVF
SILKVLRRLLYKSVF

SEQ ID NO: 269248 - protein, 15 aa, Artificial Sequence
  Description of Artificial Sequence: Synthetic peptide
  Seed: SIGKVCRTLLAKSVF
SILKVLRSLLAKSVF

SEQ ID NO: 269249 - protein, 15 aa, Artificial Sequence
  Description of Artificial Sequence: Synthetic peptide
  Seed: SIGKVCRTLLAKSVF
SILKVLRSLLDKSVF

SEQ ID NO: 269250 - protein, 15 aa, Artificial Sequence
  Description of Artificial Sequence: Synthetic peptide
  Seed: SIGKVCRTLLAKSVF
SILKVLRSLLEKSVF

SEQ ID NO: 269251 - protein, 15 aa, Artificial Sequence
  Description of Artificial Sequence: Synthetic peptide
  Seed: SIGKVCRTLLAKSVF
SILKVLRSLLGKSVF

SEQ ID NO: 269252 - protein, 15 aa, Artificial Sequence
  Description of Artificial Sequence: Synthetic peptide
  Seed: SIGKVCRTLLAKSVF
SILKVLRSLLHKSVF

SEQ ID NO: 269253 - protein, 15 aa, Artificial Sequence
  Description of Artificial Sequence: Synthetic peptide
  Seed: SIGKVCRTLLAKSVF
SILKVLRSLLMKSVF

SEQ ID NO: 269254 - protein, 15 aa, Artificial Sequence
  Description of Artificial Sequence: Synthetic peptide
  Seed: SIGKVCRTLLAKSVF
SILKVLRSLLNKSVF

SEQ ID NO: 269255 - protein, 15 aa, Artificial Sequence
  Description of Artificial Sequence: Synthetic peptide
  Seed: SIGKVCRTLLAKSVF
SILKVLRSLLPKSVF

SEQ ID NO: 269256 - protein, 15 aa, Artificial Sequence
  Description of Artificial Sequence: Synthetic peptide
  Seed: SIGKVCRTLLAKSVF
SILKVLRSLLQKSVF

SEQ ID NO: 269257 - protein, 15 aa, Artificial Sequence
  Description of Artificial Sequence: Synthetic peptide
  Seed: SIGKVCRTLLAKSVF
SILKVLRSLLRKSVF

SEQ ID NO: 269258 - protein, 15 aa, Artificial Sequence
  Description of Artificial Sequence: Synthetic peptide
  Seed: SIGKVCRTLLAKSVF
SILKVLRSLLSKSVF

SEQ ID NO: 269259 - protein, 15 aa, Artificial Sequence
  Description of Artificial Sequence: Synthetic peptide
  Seed: SIGKVCRTLLAKSVF
SILKVLRSLLTKSVF

SEQ ID NO: 269260 - protein, 15 aa, Artificial Sequence
  Description of Artificial Sequence: Synthetic peptide
  Seed: SIGKVCRTLLAKSVF
SILKVLRSLLVKSVF

SEQ ID NO: 269261 - protein, 15 aa, Artificial Sequence
  Description of Artificial Sequence: Synthetic peptide
  Seed: SIGKVCRTLLAKSVF
SILKVLRSLLYKSVF

SEQ ID NO: 269262 - protein, 15 aa, Artificial Sequence
  Description of Artificial Sequence: Synthetic peptide
  Seed: SIGKVCRTLLAKSVF
SILKVLRTLLAKSVF

SEQ ID NO: 269263 - protein, 15 aa, Artificial Sequence
  Description of Artificial Sequence: Synthetic peptide
  Seed: SIGKVCRTLLAKSVF
SILKVLRTLLDKSVF

SEQ ID NO: 269264 - protein, 15 aa, Artificial Sequence
  Description of Artificial Sequence: Synthetic peptide
  Seed: SIGKVCRTLLAKSVF
SILKVLRTLLEKSVF

SEQ ID NO: 269265 - protein, 15 aa, Artificial Sequence
  Description of Artificial Sequence: Synthetic peptide
  Seed: SIGKVCRTLLAKSVF
SILKVLRTLLGKSVF

SEQ ID NO: 269266 - protein, 15 aa, Artificial Sequence
  Description of Artificial Sequence: Synthetic peptide
  Seed: SIGKVCRTLLAKSVF
SILKVLRTLLHKSVF

SEQ ID NO: 269267 - protein, 15 aa, Artificial Sequence
  Description of Artificial Sequence: Synthetic peptide
  Seed: SIGKVCRTLLAKSVF
SILKVLRTLLKKSVF

SEQ ID NO: 269268 - protein, 15 aa, Artificial Sequence
  Description of Artificial Sequence: Synthetic peptide
  Seed: SIGKVCRTLLAKSVF
SILKVLRTLLMKSVF

SEQ ID NO: 269269 - protein, 15 aa, Artificial Sequence
  Description of Artificial Sequence: Synthetic peptide
  Seed: SIGKVCRTLLAKSVF
SILKVLRTLLNKSVF

SEQ ID NO: 269270 - protein, 15 aa, Artificial Sequence
  Description of Artificial Sequence: Synthetic peptide
  Seed: SIGKVCRTLLAKSVF
SILKVLRTLLPKSVF

SEQ ID NO: 269271 - protein, 15 aa, Artificial Sequence
  Description of Artificial Sequence: Synthetic peptide
  Seed: SIGKVCRTLLAKSVF
SILKVLRTLLQKSVF

SEQ ID NO: 269272 - protein, 15 aa, Artificial Sequence
  Description of Artificial Sequence: Synthetic peptide
  Seed: SIGKVCRTLLAKSVF
SILKVLRTLLRKSVF

SEQ ID NO: 269273 - protein, 15 aa, Artificial Sequence
  Description of Artificial Sequence: Synthetic peptide
  Seed: SIGKVCRTLLAKSVF
SILKVLRTLLSKSVF

SEQ ID NO: 269274 - protein, 15 aa, Artificial Sequence
  Description of Artificial Sequence: Synthetic peptide
  Seed: SIGKVCRTLLAKSVF
SILKVLRTLLTKSVF

SEQ ID NO: 269275 - protein, 15 aa, Artificial Sequence
  Description of Artificial Sequence: Synthetic peptide
  Seed: SIGKVCRTLLAKSVF
SILKVLRTLLVKSVF

SEQ ID NO: 269276 - protein, 15 aa, Artificial Sequence
  Description of Artificial Sequence: Synthetic peptide
  Seed: SIGKVCRTLLAKSVF
SILKVLRTLLYKSVF

SEQ ID NO: 269277 - protein, 15 aa, Artificial Sequence
  Description of Artificial Sequence: Synthetic peptide
  Seed: SIGKVCRTLLAKSVF
SILKVLRVLLHKSVF

SEQ ID NO: 269278 - protein, 15 aa, Artificial Sequence
  Description of Artificial Sequence: Synthetic peptide
  Seed: SIGKVCRTLLAKSVF
SILKVLRVLLSKSVF

SEQ ID NO: 269279 - protein, 15 aa, Artificial Sequence
  Description of Artificial Sequence: Synthetic peptide
  Seed: SIGKVCRTLLAKSVF
SILKVMRALLAKSVF

SEQ ID NO: 269280 - protein, 15 aa, Artificial Sequence
  Description of Artificial Sequence: Synthetic peptide
  Seed: SIGKVCRTLLAKSVF
SILKVMRALLDKSVF

SEQ ID NO: 269281 - protein, 15 aa, Artificial Sequence
  Description of Artificial Sequence: Synthetic peptide
  Seed: SIGKVCRTLLAKSVF
SILKVMRALLEKSVF

SEQ ID NO: 269282 - protein, 15 aa, Artificial Sequence
  Description of Artificial Sequence: Synthetic peptide
  Seed: SIGKVCRTLLAKSVF
SILKVMRALLGKSVF

SEQ ID NO: 269283 - protein, 15 aa, Artificial Sequence
  Description of Artificial Sequence: Synthetic peptide
  Seed: SIGKVCRTLLAKSVF
SILKVMRALLHKSVF

SEQ ID NO: 269284 - protein, 15 aa, Artificial Sequence
  Description of Artificial Sequence: Synthetic peptide
  Seed: SIGKVCRTLLAKSVF
SILKVMRALLKKSVF

SEQ ID NO: 269285 - protein, 15 aa, Artificial Sequence
  Description of Artificial Sequence: Synthetic peptide
  Seed: SIGKVCRTLLAKSVF
SILKVMRALLMKSVF

SEQ ID NO: 269286 - protein, 15 aa, Artificial Sequence
  Description of Artificial Sequence: Synthetic peptide
  Seed: SIGKVCRTLLAKSVF
SILKVMRALLNKSVF

SEQ ID NO: 269287 - protein, 15 aa, Artificial Sequence
  Description of Artificial Sequence: Synthetic peptide
  Seed: SIGKVCRTLLAKSVF
SILKVMRALLPKSVF

SEQ ID NO: 269288 - protein, 15 aa, Artificial Sequence
  Description of Artificial Sequence: Synthetic peptide
  Seed: SIGKVCRTLLAKSVF
SILKVMRALLQKSVF

SEQ ID NO: 269289 - protein, 15 aa, Artificial Sequence
  Description of Artificial Sequence: Synthetic peptide
  Seed: SIGKVCRTLLAKSVF
SILKVMRALLRKSVF

SEQ ID NO: 269290 - protein, 15 aa, Artificial Sequence
  Description of Artificial Sequence: Synthetic peptide
  Seed: SIGKVCRTLLAKSVF
SILKVMRALLSKSVF

SEQ ID NO: 269291 - protein, 15 aa, Artificial Sequence
  Description of Artificial Sequence: Synthetic peptide
  Seed: SIGKVCRTLLAKSVF
SILKVMRALLTKSVF

SEQ ID NO: 269292 - protein, 15 aa, Artificial Sequence
  Description of Artificial Sequence: Synthetic peptide
  Seed: SIGKVCRTLLAKSVF
SILKVMRALLVKSVF

SEQ ID NO: 269293 - protein, 15 aa, Artificial Sequence
  Description of Artificial Sequence: Synthetic peptide
  Seed: SIGKVCRTLLAKSVF
SILKVMRALLYKSVF

SEQ ID NO: 269294 - protein, 15 aa, Artificial Sequence
  Description of Artificial Sequence: Synthetic peptide
  Seed: SIGKVCRTLLAKSVF
SILKVMRDLLAKSVF

SEQ ID NO: 269295 - protein, 15 aa, Artificial Sequence
  Description of Artificial Sequence: Synthetic peptide
  Seed: SIGKVCRTLLAKSVF
SILKVMRDLLGKSVF

SEQ ID NO: 269296 - protein, 15 aa, Artificial Sequence
  Description of Artificial Sequence: Synthetic peptide
  Seed: SIGKVCRTLLAKSVF
SILKVMRDLLRKSVF

SEQ ID NO: 269297 - protein, 15 aa, Artificial Sequence
  Description of Artificial Sequence: Synthetic peptide
  Seed: SIGKVCRTLLAKSVF
SILKVMRDLLSKSVF

SEQ ID NO: 269298 - protein, 15 aa, Artificial Sequence
  Description of Artificial Sequence: Synthetic peptide
  Seed: SIGKVCRTLLAKSVF
SILKVMRDLLTKSVF

SEQ ID NO: 269299 - protein, 15 aa, Artificial Sequence
  Description of Artificial Sequence: Synthetic peptide
  Seed: SIGKVCRTLLAKSVF
SILKVMRELLAKSVF

SEQ ID NO: 269300 - protein, 15 aa, Artificial Sequence
  Description of Artificial Sequence: Synthetic peptide
  Seed: SIGKVCRTLLAKSVF
SILKVMRELLGKSVF

SEQ ID NO: 269301 - protein, 15 aa, Artificial Sequence
  Description of Artificial Sequence: Synthetic peptide
  Seed: SIGKVCRTLLAKSVF
SILKVMRELLHKSVF

SEQ ID NO: 269302 - protein, 15 aa, Artificial Sequence
  Description of Artificial Sequence: Synthetic peptide
  Seed: SIGKVCRTLLAKSVF
SILKVMRELLKKSVF

SEQ ID NO: 269303 - protein, 15 aa, Artificial Sequence
  Description of Artificial Sequence: Synthetic peptide
  Seed: SIGKVCRTLLAKSVF
SILKVMRELLRKSVF

SEQ ID NO: 269304 - protein, 15 aa, Artificial Sequence
  Description of Artificial Sequence: Synthetic peptide
  Seed: SIGKVCRTLLAKSVF
SILKVMRELLSKSVF

SEQ ID NO: 269305 - protein, 15 aa, Artificial Sequence
  Description of Artificial Sequence: Synthetic peptide
  Seed: SIGKVCRTLLAKSVF
SILKVMRGLLAKSVF

SEQ ID NO: 269306 - protein, 15 aa, Artificial Sequence
  Description of Artificial Sequence: Synthetic peptide
  Seed: SIGKVCRTLLAKSVF
SILKVMRGLLDKSVF

SEQ ID NO: 269307 - protein, 15 aa, Artificial Sequence
  Description of Artificial Sequence: Synthetic peptide
  Seed: SIGKVCRTLLAKSVF
SILKVMRGLLEKSVF

SEQ ID NO: 269308 - protein, 15 aa, Artificial Sequence
  Description of Artificial Sequence: Synthetic peptide
  Seed: SIGKVCRTLLAKSVF
SILKVMRGLLGKSVF

SEQ ID NO: 269309 - protein, 15 aa, Artificial Sequence
  Description of Artificial Sequence: Synthetic peptide
  Seed: SIGKVCRTLLAKSVF
SILKVMRGLLHKSVF

SEQ ID NO: 269310 - protein, 15 aa, Artificial Sequence
  Description of Artificial Sequence: Synthetic peptide
  Seed: SIGKVCRTLLAKSVF
SILKVMRGLLIKSVF

SEQ ID NO: 269311 - protein, 15 aa, Artificial Sequence
  Description of Artificial Sequence: Synthetic peptide
  Seed: SIGKVCRTLLAKSVF
SILKVMRGLLLKSVF

SEQ ID NO: 269312 - protein, 15 aa, Artificial Sequence
  Description of Artificial Sequence: Synthetic peptide
  Seed: SIGKVCRTLLAKSVF
SILKVMRGLLMKSVF

SEQ ID NO: 269313 - protein, 15 aa, Artificial Sequence
  Description of Artificial Sequence: Synthetic peptide
  Seed: SIGKVCRTLLAKSVF
SILKVMRGLLNKSVF

SEQ ID NO: 269314 - protein, 15 aa, Artificial Sequence
  Description of Artificial Sequence: Synthetic peptide
  Seed: SIGKVCRTLLAKSVF
SILKVMRGLLPKSVF

SEQ ID NO: 269315 - protein, 15 aa, Artificial Sequence
  Description of Artificial Sequence: Synthetic peptide
  Seed: SIGKVCRTLLAKSVF
SILKVMRGLLQKSVF

SEQ ID NO: 269316 - protein, 15 aa, Artificial Sequence
  Description of Artificial Sequence: Synthetic peptide
  Seed: SIGKVCRTLLAKSVF
SILKVMRGLLRKSVF

SEQ ID NO: 269317 - protein, 15 aa, Artificial Sequence
  Description of Artificial Sequence: Synthetic peptide
  Seed: SIGKVCRTLLAKSVF
SILKVMRGLLSKSVF

SEQ ID NO: 269318 - protein, 15 aa, Artificial Sequence
  Description of Artificial Sequence: Synthetic peptide
  Seed: SIGKVCRTLLAKSVF
SILKVMRGLLTKSVF

SEQ ID NO: 269319 - protein, 15 aa, Artificial Sequence
  Description of Artificial Sequence: Synthetic peptide
  Seed: SIGKVCRTLLAKSVF
SILKVMRGLLVKSVF

SEQ ID NO: 269320 - protein, 15 aa, Artificial Sequence
  Description of Artificial Sequence: Synthetic peptide
  Seed: SIGKVCRTLLAKSVF
SILKVMRGLLYKSVF

SEQ ID NO: 269321 - protein, 15 aa, Artificial Sequence
  Description of Artificial Sequence: Synthetic peptide
  Seed: SIGKVCRTLLAKSVF
SILKVMRHLLAKSVF

SEQ ID NO: 269322 - protein, 15 aa, Artificial Sequence
  Description of Artificial Sequence: Synthetic peptide
  Seed: SIGKVCRTLLAKSVF
SILKVMRHLLCKSVF

SEQ ID NO: 269323 - protein, 15 aa, Artificial Sequence
  Description of Artificial Sequence: Synthetic peptide
  Seed: SIGKVCRTLLAKSVF
SILKVMRHLLDKSVF

SEQ ID NO: 269324 - protein, 15 aa, Artificial Sequence
  Description of Artificial Sequence: Synthetic peptide
  Seed: SIGKVCRTLLAKSVF
SILKVMRHLLEKSVF

SEQ ID NO: 269325 - protein, 15 aa, Artificial Sequence
  Description of Artificial Sequence: Synthetic peptide
  Seed: SIGKVCRTLLAKSVF
SILKVMRHLLFKSVF

SEQ ID NO: 269326 - protein, 15 aa, Artificial Sequence
  Description of Artificial Sequence: Synthetic peptide
  Seed: SIGKVCRTLLAKSVF
SILKVMRHLLGKSVF

SEQ ID NO: 269327 - protein, 15 aa, Artificial Sequence
  Description of Artificial Sequence: Synthetic peptide
  Seed: SIGKVCRTLLAKSVF
SILKVMRHLLHKSVF

SEQ ID NO: 269328 - protein, 15 aa, Artificial Sequence
  Description of Artificial Sequence: Synthetic peptide
  Seed: SIGKVCRTLLAKSVF
SILKVMRHLLIKSVF

SEQ ID NO: 269329 - protein, 15 aa, Artificial Sequence
  Description of Artificial Sequence: Synthetic peptide
  Seed: SIGKVCRTLLAKSVF
SILKVMRHLLKKSVF

SEQ ID NO: 269330 - protein, 15 aa, Artificial Sequence
  Description of Artificial Sequence: Synthetic peptide
  Seed: SIGKVCRTLLAKSVF
SILKVMRHLLLKSVF

SEQ ID NO: 269331 - protein, 15 aa, Artificial Sequence
  Description of Artificial Sequence: Synthetic peptide
  Seed: SIGKVCRTLLAKSVF
SILKVMRHLLMKSVF

SEQ ID NO: 269332 - protein, 15 aa, Artificial Sequence
  Description of Artificial Sequence: Synthetic peptide
  Seed: SIGKVCRTLLAKSVF
SILKVMRHLLNKSVF

SEQ ID NO: 269333 - protein, 15 aa, Artificial Sequence
  Description of Artificial Sequence: Synthetic peptide
  Seed: SIGKVCRTLLAKSVF
SILKVMRHLLPKSVF

SEQ ID NO: 269334 - protein, 15 aa, Artificial Sequence
  Description of Artificial Sequence: Synthetic peptide
  Seed: SIGKVCRTLLAKSVF
SILKVMRHLLQKSVF

SEQ ID NO: 269335 - protein, 15 aa, Artificial Sequence
  Description of Artificial Sequence: Synthetic peptide
  Seed: SIGKVCRTLLAKSVF
SILKVMRHLLRKSVF

SEQ ID NO: 269336 - protein, 15 aa, Artificial Sequence
  Description of Artificial Sequence: Synthetic peptide
  Seed: SIGKVCRTLLAKSVF
SILKVMRHLLSKSVF

SEQ ID NO: 269337 - protein, 15 aa, Artificial Sequence
  Description of Artificial Sequence: Synthetic peptide
  Seed: SIGKVCRTLLAKSVF
SILKVMRHLLTKSVF

SEQ ID NO: 269338 - protein, 15 aa, Artificial Sequence
  Description of Artificial Sequence: Synthetic peptide
  Seed: SIGKVCRTLLAKSVF
SILKVMRHLLVKSVF

SEQ ID NO: 269339 - protein, 15 aa, Artificial Sequence
  Description of Artificial Sequence: Synthetic peptide
  Seed: SIGKVCRTLLAKSVF
SILKVMRHLLWKSVF

SEQ ID NO: 269340 - protein, 15 aa, Artificial Sequence
  Description of Artificial Sequence: Synthetic peptide
  Seed: SIGKVCRTLLAKSVF
SILKVMRHLLYKSVF

SEQ ID NO: 269341 - protein, 15 aa, Artificial Sequence
  Description of Artificial Sequence: Synthetic peptide
  Seed: SIGKVCRTLLAKSVF
SILKVMRILLAKSVF

SEQ ID NO: 269342 - protein, 15 aa, Artificial Sequence
  Description of Artificial Sequence: Synthetic peptide
  Seed: SIGKVCRTLLAKSVF
SILKVMRILLGKSVF

SEQ ID NO: 269343 - protein, 15 aa, Artificial Sequence
  Description of Artificial Sequence: Synthetic peptide
  Seed: SIGKVCRTLLAKSVF
SILKVMRILLHKSVF

SEQ ID NO: 269344 - protein, 15 aa, Artificial Sequence
  Description of Artificial Sequence: Synthetic peptide
  Seed: SIGKVCRTLLAKSVF
SILKVMRILLNKSVF

SEQ ID NO: 269345 - protein, 15 aa, Artificial Sequence
  Description of Artificial Sequence: Synthetic peptide
  Seed: SIGKVCRTLLAKSVF
SILKVMRILLPKSVF

SEQ ID NO: 269346 - protein, 15 aa, Artificial Sequence
  Description of Artificial Sequence: Synthetic peptide
  Seed: SIGKVCRTLLAKSVF
SILKVMRILLQKSVF

SEQ ID NO: 269347 - protein, 15 aa, Artificial Sequence
  Description of Artificial Sequence: Synthetic peptide
  Seed: SIGKVCRTLLAKSVF
SILKVMRILLSKSVF

SEQ ID NO: 269348 - protein, 15 aa, Artificial Sequence
  Description of Artificial Sequence: Synthetic peptide
  Seed: SIGKVCRTLLAKSVF
SILKVMRILLTKSVF

SEQ ID NO: 269349 - protein, 15 aa, Artificial Sequence
  Description of Artificial Sequence: Synthetic peptide
  Seed: SIGKVCRTLLAKSVF
SILKVMRKLLAKSVF

SEQ ID NO: 269350 - protein, 15 aa, Artificial Sequence
  Description of Artificial Sequence: Synthetic peptide
  Seed: SIGKVCRTLLAKSVF
SILKVMRKLLCKSVF

SEQ ID NO: 269351 - protein, 15 aa, Artificial Sequence
  Description of Artificial Sequence: Synthetic peptide
  Seed: SIGKVCRTLLAKSVF
SILKVMRKLLDKSVF

SEQ ID NO: 269352 - protein, 15 aa, Artificial Sequence
  Description of Artificial Sequence: Synthetic peptide
  Seed: SIGKVCRTLLAKSVF
SILKVMRKLLEKSVF

SEQ ID NO: 269353 - protein, 15 aa, Artificial Sequence
  Description of Artificial Sequence: Synthetic peptide
  Seed: SIGKVCRTLLAKSVF
SILKVMRKLLFKSVF

SEQ ID NO: 269354 - protein, 15 aa, Artificial Sequence
  Description of Artificial Sequence: Synthetic peptide
  Seed: SIGKVCRTLLAKSVF
SILKVMRKLLGKSVF

SEQ ID NO: 269355 - protein, 15 aa, Artificial Sequence
  Description of Artificial Sequence: Synthetic peptide
  Seed: SIGKVCRTLLAKSVF
SILKVMRKLLHKSVF

SEQ ID NO: 269356 - protein, 15 aa, Artificial Sequence
  Description of Artificial Sequence: Synthetic peptide
  Seed: SIGKVCRTLLAKSVF
SILKVMRKLLIKSVF

SEQ ID NO: 269357 - protein, 15 aa, Artificial Sequence
  Description of Artificial Sequence: Synthetic peptide
  Seed: SIGKVCRTLLAKSVF
SILKVMRKLLKKSVF

SEQ ID NO: 269358 - protein, 15 aa, Artificial Sequence
  Description of Artificial Sequence: Synthetic peptide
  Seed: SIGKVCRTLLAKSVF
SILKVMRKLLLKSVF

SEQ ID NO: 269359 - protein, 15 aa, Artificial Sequence
  Description of Artificial Sequence: Synthetic peptide
  Seed: SIGKVCRTLLAKSVF
SILKVMRKLLMKSVF

SEQ ID NO: 269360 - protein, 15 aa, Artificial Sequence
  Description of Artificial Sequence: Synthetic peptide
  Seed: SIGKVCRTLLAKSVF
SILKVMRKLLNKSVF

SEQ ID NO: 269361 - protein, 15 aa, Artificial Sequence
  Description of Artificial Sequence: Synthetic peptide
  Seed: SIGKVCRTLLAKSVF
SILKVMRKLLPKSVF

SEQ ID NO: 269362 - protein, 15 aa, Artificial Sequence
  Description of Artificial Sequence: Synthetic peptide
  Seed: SIGKVCRTLLAKSVF
SILKVMRKLLQKSVF

SEQ ID NO: 269363 - protein, 15 aa, Artificial Sequence
  Description of Artificial Sequence: Synthetic peptide
  Seed: SIGKVCRTLLAKSVF
SILKVMRKLLRKSVF

SEQ ID NO: 269364 - protein, 15 aa, Artificial Sequence
  Description of Artificial Sequence: Synthetic peptide
  Seed: SIGKVCRTLLAKSVF
SILKVMRKLLSKSVF

SEQ ID NO: 269365 - protein, 15 aa, Artificial Sequence
  Description of Artificial Sequence: Synthetic peptide
  Seed: SIGKVCRTLLAKSVF
SILKVMRKLLTKSVF

SEQ ID NO: 269366 - protein, 15 aa, Artificial Sequence
  Description of Artificial Sequence: Synthetic peptide
  Seed: SIGKVCRTLLAKSVF
SILKVMRKLLVKSVF

SEQ ID NO: 269367 - protein, 15 aa, Artificial Sequence
  Description of Artificial Sequence: Synthetic peptide
  Seed: SIGKVCRTLLAKSVF
SILKVMRKLLWKSVF

SEQ ID NO: 269368 - protein, 15 aa, Artificial Sequence
  Description of Artificial Sequence: Synthetic peptide
  Seed: SIGKVCRTLLAKSVF
SILKVMRKLLYKSVF

SEQ ID NO: 269369 - protein, 15 aa, Artificial Sequence
  Description of Artificial Sequence: Synthetic peptide
  Seed: SIGKVCRTLLAKSVF
SILKVMRLLLHKSVF

SEQ ID NO: 269370 - protein, 15 aa, Artificial Sequence
  Description of Artificial Sequence: Synthetic peptide
  Seed: SIGKVCRTLLAKSVF
SILKVMRMLLAKSVF

SEQ ID NO: 269371 - protein, 15 aa, Artificial Sequence
  Description of Artificial Sequence: Synthetic peptide
  Seed: SIGKVCRTLLAKSVF
SILKVMRMLLHKSVF

SEQ ID NO: 269372 - protein, 15 aa, Artificial Sequence
  Description of Artificial Sequence: Synthetic peptide
  Seed: SIGKVCRTLLAKSVF
SILKVMRMLLSKSVF

SEQ ID NO: 269373 - protein, 15 aa, Artificial Sequence
  Description of Artificial Sequence: Synthetic peptide
  Seed: SIGKVCRTLLAKSVF
SILKVMRNLLAKSVF

SEQ ID NO: 269374 - protein, 15 aa, Artificial Sequence
  Description of Artificial Sequence: Synthetic peptide
  Seed: SIGKVCRTLLAKSVF
SILKVMRNLLDKSVF

SEQ ID NO: 269375 - protein, 15 aa, Artificial Sequence
  Description of Artificial Sequence: Synthetic peptide
  Seed: SIGKVCRTLLAKSVF
SILKVMRNLLEKSVF

SEQ ID NO: 269376 - protein, 15 aa, Artificial Sequence
  Description of Artificial Sequence: Synthetic peptide
  Seed: SIGKVCRTLLAKSVF
SILKVMRNLLGKSVF

SEQ ID NO: 269377 - protein, 15 aa, Artificial Sequence
  Description of Artificial Sequence: Synthetic peptide
  Seed: SIGKVCRTLLAKSVF
SILKVMRNLLHKSVF

SEQ ID NO: 269378 - protein, 15 aa, Artificial Sequence
  Description of Artificial Sequence: Synthetic peptide
  Seed: SIGKVCRTLLAKSVF
SILKVMRNLLIKSVF

SEQ ID NO: 269379 - protein, 15 aa, Artificial Sequence
  Description of Artificial Sequence: Synthetic peptide
  Seed: SIGKVCRTLLAKSVF
SILKVMRNLLKKSVF

SEQ ID NO: 269380 - protein, 15 aa, Artificial Sequence
  Description of Artificial Sequence: Synthetic peptide
  Seed: SIGKVCRTLLAKSVF
SILKVMRNLLLKSVF

SEQ ID NO: 269381 - protein, 15 aa, Artificial Sequence
  Description of Artificial Sequence: Synthetic peptide
  Seed: SIGKVCRTLLAKSVF
SILKVMRNLLMKSVF

SEQ ID NO: 269382 - protein, 15 aa, Artificial Sequence
  Description of Artificial Sequence: Synthetic peptide
  Seed: SIGKVCRTLLAKSVF
SILKVMRNLLNKSVF

SEQ ID NO: 269383 - protein, 15 aa, Artificial Sequence
  Description of Artificial Sequence: Synthetic peptide
  Seed: SIGKVCRTLLAKSVF
SILKVMRNLLPKSVF

SEQ ID NO: 269384 - protein, 15 aa, Artificial Sequence
  Description of Artificial Sequence: Synthetic peptide
  Seed: SIGKVCRTLLAKSVF
SILKVMRNLLQKSVF

SEQ ID NO: 269385 - protein, 15 aa, Artificial Sequence
  Description of Artificial Sequence: Synthetic peptide
  Seed: SIGKVCRTLLAKSVF
SILKVMRNLLRKSVF

SEQ ID NO: 269386 - protein, 15 aa, Artificial Sequence
  Description of Artificial Sequence: Synthetic peptide
  Seed: SIGKVCRTLLAKSVF
SILKVMRNLLSKSVF

SEQ ID NO: 269387 - protein, 15 aa, Artificial Sequence
  Description of Artificial Sequence: Synthetic peptide
  Seed: SIGKVCRTLLAKSVF
SILKVMRNLLTKSVF

SEQ ID NO: 269388 - protein, 15 aa, Artificial Sequence
  Description of Artificial Sequence: Synthetic peptide
  Seed: SIGKVCRTLLAKSVF
SILKVMRNLLVKSVF

SEQ ID NO: 269389 - protein, 15 aa, Artificial Sequence
  Description of Artificial Sequence: Synthetic peptide
  Seed: SIGKVCRTLLAKSVF
SILKVMRNLLYKSVF

SEQ ID NO: 269390 - protein, 15 aa, Artificial Sequence
  Description of Artificial Sequence: Synthetic peptide
  Seed: SIGKVCRTLLAKSVF
SILKVMRPLLAKSVF

SEQ ID NO: 269391 - protein, 15 aa, Artificial Sequence
  Description of Artificial Sequence: Synthetic peptide
  Seed: SIGKVCRTLLAKSVF
SILKVMRPLLCKSVF

SEQ ID NO: 269392 - protein, 15 aa, Artificial Sequence
  Description of Artificial Sequence: Synthetic peptide
  Seed: SIGKVCRTLLAKSVF
SILKVMRPLLDKSVF

SEQ ID NO: 269393 - protein, 15 aa, Artificial Sequence
  Description of Artificial Sequence: Synthetic peptide
  Seed: SIGKVCRTLLAKSVF
SILKVMRPLLEKSVF

SEQ ID NO: 269394 - protein, 15 aa, Artificial Sequence
  Description of Artificial Sequence: Synthetic peptide
  Seed: SIGKVCRTLLAKSVF
SILKVMRPLLFKSVF

SEQ ID NO: 269395 - protein, 15 aa, Artificial Sequence
  Description of Artificial Sequence: Synthetic peptide
  Seed: SIGKVCRTLLAKSVF
SILKVMRPLLGKSVF

SEQ ID NO: 269396 - protein, 15 aa, Artificial Sequence
  Description of Artificial Sequence: Synthetic peptide
  Seed: SIGKVCRTLLAKSVF
SILKVMRPLLHKSVF

SEQ ID NO: 269397 - protein, 15 aa, Artificial Sequence
  Description of Artificial Sequence: Synthetic peptide
  Seed: SIGKVCRTLLAKSVF
SILKVMRPLLIKSVF

SEQ ID NO: 269398 - protein, 15 aa, Artificial Sequence
  Description of Artificial Sequence: Synthetic peptide
  Seed: SIGKVCRTLLAKSVF
SILKVMRPLLLKSVF

SEQ ID NO: 269399 - protein, 15 aa, Artificial Sequence
  Description of Artificial Sequence: Synthetic peptide
  Seed: SIGKVCRTLLAKSVF
SILKVMRPLLMKSVF

SEQ ID NO: 269400 - protein, 15 aa, Artificial Sequence
  Description of Artificial Sequence: Synthetic peptide
  Seed: SIGKVCRTLLAKSVF
SILKVMRPLLNKSVF

SEQ ID NO: 269401 - protein, 15 aa, Artificial Sequence
  Description of Artificial Sequence: Synthetic peptide
  Seed: SIGKVCRTLLAKSVF
SILKVMRPLLPKSVF

SEQ ID NO: 269402 - protein, 15 aa, Artificial Sequence
  Description of Artificial Sequence: Synthetic peptide
  Seed: SIGKVCRTLLAKSVF
SILKVMRPLLQKSVF

SEQ ID NO: 269403 - protein, 15 aa, Artificial Sequence
  Description of Artificial Sequence: Synthetic peptide
  Seed: SIGKVCRTLLAKSVF
SILKVMRPLLRKSVF

SEQ ID NO: 269404 - protein, 15 aa, Artificial Sequence
  Description of Artificial Sequence: Synthetic peptide
  Seed: SIGKVCRTLLAKSVF
SILKVMRPLLSKSVF

SEQ ID NO: 269405 - protein, 15 aa, Artificial Sequence
  Description of Artificial Sequence: Synthetic peptide
  Seed: SIGKVCRTLLAKSVF
SILKVMRPLLTKSVF

SEQ ID NO: 269406 - protein, 15 aa, Artificial Sequence
  Description of Artificial Sequence: Synthetic peptide
  Seed: SIGKVCRTLLAKSVF
SILKVMRPLLVKSVF

SEQ ID NO: 269407 - protein, 15 aa, Artificial Sequence
  Description of Artificial Sequence: Synthetic peptide
  Seed: SIGKVCRTLLAKSVF
SILKVMRPLLYKSVF

SEQ ID NO: 269408 - protein, 15 aa, Artificial Sequence
  Description of Artificial Sequence: Synthetic peptide
  Seed: SIGKVCRTLLAKSVF
SILKVMRQLLAKSVF

SEQ ID NO: 269409 - protein, 15 aa, Artificial Sequence
  Description of Artificial Sequence: Synthetic peptide
  Seed: SIGKVCRTLLAKSVF
SILKVMRQLLGKSVF

SEQ ID NO: 269410 - protein, 15 aa, Artificial Sequence
  Description of Artificial Sequence: Synthetic peptide
  Seed: SIGKVCRTLLAKSVF
SILKVMRQLLHKSVF

SEQ ID NO: 269411 - protein, 15 aa, Artificial Sequence
  Description of Artificial Sequence: Synthetic peptide
  Seed: SIGKVCRTLLAKSVF
SILKVMRQLLKKSVF

SEQ ID NO: 269412 - protein, 15 aa, Artificial Sequence
  Description of Artificial Sequence: Synthetic peptide
  Seed: SIGKVCRTLLAKSVF
SILKVMRQLLNKSVF

SEQ ID NO: 269413 - protein, 15 aa, Artificial Sequence
  Description of Artificial Sequence: Synthetic peptide
  Seed: SIGKVCRTLLAKSVF
SILKVMRQLLPKSVF

SEQ ID NO: 269414 - protein, 15 aa, Artificial Sequence
  Description of Artificial Sequence: Synthetic peptide
  Seed: SIGKVCRTLLAKSVF
SILKVMRQLLQKSVF

SEQ ID NO: 269415 - protein, 15 aa, Artificial Sequence
  Description of Artificial Sequence: Synthetic peptide
  Seed: SIGKVCRTLLAKSVF
SILKVMRQLLRKSVF

SEQ ID NO: 269416 - protein, 15 aa, Artificial Sequence
  Description of Artificial Sequence: Synthetic peptide
  Seed: SIGKVCRTLLAKSVF
SILKVMRQLLSKSVF

SEQ ID NO: 269417 - protein, 15 aa, Artificial Sequence
  Description of Artificial Sequence: Synthetic peptide
  Seed: SIGKVCRTLLAKSVF
SILKVMRQLLTKSVF

SEQ ID NO: 269418 - protein, 15 aa, Artificial Sequence
  Description of Artificial Sequence: Synthetic peptide
  Seed: SIGKVCRTLLAKSVF
SILKVMRQLLYKSVF

SEQ ID NO: 269419 - protein, 15 aa, Artificial Sequence
  Description of Artificial Sequence: Synthetic peptide
  Seed: SIGKVCRTLLAKSVF
SILKVMRRLLAKSVF

SEQ ID NO: 269420 - protein, 15 aa, Artificial Sequence
  Description of Artificial Sequence: Synthetic peptide
  Seed: SIGKVCRTLLAKSVF
SILKVMRRLLCKSVF

SEQ ID NO: 269421 - protein, 15 aa, Artificial Sequence
  Description of Artificial Sequence: Synthetic peptide
  Seed: SIGKVCRTLLAKSVF
SILKVMRRLLDKSVF

SEQ ID NO: 269422 - protein, 15 aa, Artificial Sequence
  Description of Artificial Sequence: Synthetic peptide
  Seed: SIGKVCRTLLAKSVF
SILKVMRRLLEKSVF

SEQ ID NO: 269423 - protein, 15 aa, Artificial Sequence
  Description of Artificial Sequence: Synthetic peptide
  Seed: SIGKVCRTLLAKSVF
SILKVMRRLLFKSVF

SEQ ID NO: 269424 - protein, 15 aa, Artificial Sequence
  Description of Artificial Sequence: Synthetic peptide
  Seed: SIGKVCRTLLAKSVF
SILKVMRRLLGKSVF

SEQ ID NO: 269425 - protein, 15 aa, Artificial Sequence
  Description of Artificial Sequence: Synthetic peptide
  Seed: SIGKVCRTLLAKSVF
SILKVMRRLLHKSVF

SEQ ID NO: 269426 - protein, 15 aa, Artificial Sequence
  Description of Artificial Sequence: Synthetic peptide
  Seed: SIGKVCRTLLAKSVF
SILKVMRRLLIKSVF

SEQ ID NO: 269427 - protein, 15 aa, Artificial Sequence
  Description of Artificial Sequence: Synthetic peptide
  Seed: SIGKVCRTLLAKSVF
SILKVMRRLLKKSVF

SEQ ID NO: 269428 - protein, 15 aa, Artificial Sequence
  Description of Artificial Sequence: Synthetic peptide
  Seed: SIGKVCRTLLAKSVF
SILKVMRRLLLKSVF

SEQ ID NO: 269429 - protein, 15 aa, Artificial Sequence
  Description of Artificial Sequence: Synthetic peptide
  Seed: SIGKVCRTLLAKSVF
SILKVMRRLLMKSVF

SEQ ID NO: 269430 - protein, 15 aa, Artificial Sequence
  Description of Artificial Sequence: Synthetic peptide
  Seed: SIGKVCRTLLAKSVF
SILKVMRRLLNKSVF

SEQ ID NO: 269431 - protein, 15 aa, Artificial Sequence
  Description of Artificial Sequence: Synthetic peptide
  Seed: SIGKVCRTLLAKSVF
SILKVMRRLLPKSVF

SEQ ID NO: 269432 - protein, 15 aa, Artificial Sequence
  Description of Artificial Sequence: Synthetic peptide
  Seed: SIGKVCRTLLAKSVF
SILKVMRRLLQKSVF

SEQ ID NO: 269433 - protein, 15 aa, Artificial Sequence
  Description of Artificial Sequence: Synthetic peptide
  Seed: SIGKVCRTLLAKSVF
SILKVMRRLLRKSVF

SEQ ID NO: 269434 - protein, 15 aa, Artificial Sequence
  Description of Artificial Sequence: Synthetic peptide
  Seed: SIGKVCRTLLAKSVF
SILKVMRRLLSKSVF

SEQ ID NO: 269435 - protein, 15 aa, Artificial Sequence
  Description of Artificial Sequence: Synthetic peptide
  Seed: SIGKVCRTLLAKSVF
SILKVMRRLLTKSVF

SEQ ID NO: 269436 - protein, 15 aa, Artificial Sequence
  Description of Artificial Sequence: Synthetic peptide
  Seed: SIGKVCRTLLAKSVF
SILKVMRRLLVKSVF

SEQ ID NO: 269437 - protein, 15 aa, Artificial Sequence
  Description of Artificial Sequence: Synthetic peptide
  Seed: SIGKVCRTLLAKSVF
SILKVMRRLLWKSVF

SEQ ID NO: 269438 - protein, 15 aa, Artificial Sequence
  Description of Artificial Sequence: Synthetic peptide
  Seed: SIGKVCRTLLAKSVF
SILKVMRRLLYKSVF

SEQ ID NO: 269439 - protein, 15 aa, Artificial Sequence
  Description of Artificial Sequence: Synthetic peptide
  Seed: SIGKVCRTLLAKSVF
SILKVMRSLLAKSVF

SEQ ID NO: 269440 - protein, 15 aa, Artificial Sequence
  Description of Artificial Sequence: Synthetic peptide
  Seed: SIGKVCRTLLAKSVF
SILKVMRSLLDKSVF

SEQ ID NO: 269441 - protein, 15 aa, Artificial Sequence
  Description of Artificial Sequence: Synthetic peptide
  Seed: SIGKVCRTLLAKSVF
SILKVMRSLLEKSVF

SEQ ID NO: 269442 - protein, 15 aa, Artificial Sequence
  Description of Artificial Sequence: Synthetic peptide
  Seed: SIGKVCRTLLAKSVF
SILKVMRSLLGKSVF

SEQ ID NO: 269443 - protein, 15 aa, Artificial Sequence
  Description of Artificial Sequence: Synthetic peptide
  Seed: SIGKVCRTLLAKSVF
SILKVMRSLLHKSVF

SEQ ID NO: 269444 - protein, 15 aa, Artificial Sequence
  Description of Artificial Sequence: Synthetic peptide
  Seed: SIGKVCRTLLAKSVF
SILKVMRSLLIKSVF

SEQ ID NO: 269445 - protein, 15 aa, Artificial Sequence
  Description of Artificial Sequence: Synthetic peptide
  Seed: SIGKVCRTLLAKSVF
SILKVMRSLLKKSVF

SEQ ID NO: 269446 - protein, 15 aa, Artificial Sequence
  Description of Artificial Sequence: Synthetic peptide
  Seed: SIGKVCRTLLAKSVF
SILKVMRSLLLKSVF

SEQ ID NO: 269447 - protein, 15 aa, Artificial Sequence
  Description of Artificial Sequence: Synthetic peptide
  Seed: SIGKVCRTLLAKSVF
SILKVMRSLLMKSVF

SEQ ID NO: 269448 - protein, 15 aa, Artificial Sequence
  Description of Artificial Sequence: Synthetic peptide
  Seed: SIGKVCRTLLAKSVF
SILKVMRSLLNKSVF

SEQ ID NO: 269449 - protein, 15 aa, Artificial Sequence
  Description of Artificial Sequence: Synthetic peptide
  Seed: SIGKVCRTLLAKSVF
SILKVMRSLLPKSVF

SEQ ID NO: 269450 - protein, 15 aa, Artificial Sequence
  Description of Artificial Sequence: Synthetic peptide
  Seed: SIGKVCRTLLAKSVF
SILKVMRSLLQKSVF

SEQ ID NO: 269451 - protein, 15 aa, Artificial Sequence
  Description of Artificial Sequence: Synthetic peptide
  Seed: SIGKVCRTLLAKSVF
SILKVMRSLLRKSVF

SEQ ID NO: 269452 - protein, 15 aa, Artificial Sequence
  Description of Artificial Sequence: Synthetic peptide
  Seed: SIGKVCRTLLAKSVF
SILKVMRSLLSKSVF

SEQ ID NO: 269453 - protein, 15 aa, Artificial Sequence
  Description of Artificial Sequence: Synthetic peptide
  Seed: SIGKVCRTLLAKSVF
SILKVMRSLLTKSVF

SEQ ID NO: 269454 - protein, 15 aa, Artificial Sequence
  Description of Artificial Sequence: Synthetic peptide
  Seed: SIGKVCRTLLAKSVF
SILKVMRSLLVKSVF

SEQ ID NO: 269455 - protein, 15 aa, Artificial Sequence
  Description of Artificial Sequence: Synthetic peptide
  Seed: SIGKVCRTLLAKSVF
SILKVMRSLLYKSVF

SEQ ID NO: 269456 - protein, 15 aa, Artificial Sequence
  Description of Artificial Sequence: Synthetic peptide
  Seed: SIGKVCRTLLAKSVF
SILKVMRTLLAKSVF

SEQ ID NO: 269457 - protein, 15 aa, Artificial Sequence
  Description of Artificial Sequence: Synthetic peptide
  Seed: SIGKVCRTLLAKSVF
SILKVMRTLLDKSVF

SEQ ID NO: 269458 - protein, 15 aa, Artificial Sequence
  Description of Artificial Sequence: Synthetic peptide
  Seed: SIGKVCRTLLAKSVF
SILKVMRTLLEKSVF

SEQ ID NO: 269459 - protein, 15 aa, Artificial Sequence
  Description of Artificial Sequence: Synthetic peptide
  Seed: SIGKVCRTLLAKSVF
SILKVMRTLLGKSVF

SEQ ID NO: 269460 - protein, 15 aa, Artificial Sequence
  Description of Artificial Sequence: Synthetic peptide
  Seed: SIGKVCRTLLAKSVF
SILKVMRTLLHKSVF

SEQ ID NO: 269461 - protein, 15 aa, Artificial Sequence
  Description of Artificial Sequence: Synthetic peptide
  Seed: SIGKVCRTLLAKSVF
SILKVMRTLLIKSVF

SEQ ID NO: 269462 - protein, 15 aa, Artificial Sequence
  Description of Artificial Sequence: Synthetic peptide
  Seed: SIGKVCRTLLAKSVF
SILKVMRTLLKKSVF

SEQ ID NO: 269463 - protein, 15 aa, Artificial Sequence
  Description of Artificial Sequence: Synthetic peptide
  Seed: SIGKVCRTLLAKSVF
SILKVMRTLLLKSVF

SEQ ID NO: 269464 - protein, 15 aa, Artificial Sequence
  Description of Artificial Sequence: Synthetic peptide
  Seed: SIGKVCRTLLAKSVF
SILKVMRTLLMKSVF

SEQ ID NO: 269465 - protein, 15 aa, Artificial Sequence
  Description of Artificial Sequence: Synthetic peptide
  Seed: SIGKVCRTLLAKSVF
SILKVMRTLLNKSVF

SEQ ID NO: 269466 - protein, 15 aa, Artificial Sequence
  Description of Artificial Sequence: Synthetic peptide
  Seed: SIGKVCRTLLAKSVF
SILKVMRTLLPKSVF

SEQ ID NO: 269467 - protein, 15 aa, Artificial Sequence
  Description of Artificial Sequence: Synthetic peptide
  Seed: SIGKVCRTLLAKSVF
SILKVMRTLLQKSVF

SEQ ID NO: 269468 - protein, 15 aa, Artificial Sequence
  Description of Artificial Sequence: Synthetic peptide
  Seed: SIGKVCRTLLAKSVF
SILKVMRTLLRKSVF

SEQ ID NO: 269469 - protein, 15 aa, Artificial Sequence
  Description of Artificial Sequence: Synthetic peptide
  Seed: SIGKVCRTLLAKSVF
SILKVMRTLLSKSVF

SEQ ID NO: 269470 - protein, 15 aa, Artificial Sequence
  Description of Artificial Sequence: Synthetic peptide
  Seed: SIGKVCRTLLAKSVF
SILKVMRTLLTKSVF

SEQ ID NO: 269471 - protein, 15 aa, Artificial Sequence
  Description of Artificial Sequence: Synthetic peptide
  Seed: SIGKVCRTLLAKSVF
SILKVMRTLLVKSVF

SEQ ID NO: 269472 - protein, 15 aa, Artificial Sequence
  Description of Artificial Sequence: Synthetic peptide
  Seed: SIGKVCRTLLAKSVF
SILKVMRTLLYKSVF

SEQ ID NO: 269473 - protein, 15 aa, Artificial Sequence
  Description of Artificial Sequence: Synthetic peptide
  Seed: SIGKVCRTLLAKSVF
SILKVMRVLLAKSVF

SEQ ID NO: 269474 - protein, 15 aa, Artificial Sequence
  Description of Artificial Sequence: Synthetic peptide
  Seed: SIGKVCRTLLAKSVF
SILKVMRVLLDKSVF

SEQ ID NO: 269475 - protein, 15 aa, Artificial Sequence
  Description of Artificial Sequence: Synthetic peptide
  Seed: SIGKVCRTLLAKSVF
SILKVMRVLLGKSVF

SEQ ID NO: 269476 - protein, 15 aa, Artificial Sequence
  Description of Artificial Sequence: Synthetic peptide
  Seed: SIGKVCRTLLAKSVF
SILKVMRVLLHKSVF

SEQ ID NO: 269477 - protein, 15 aa, Artificial Sequence
  Description of Artificial Sequence: Synthetic peptide
  Seed: SIGKVCRTLLAKSVF
SILKVMRVLLNKSVF

SEQ ID NO: 269478 - protein, 15 aa, Artificial Sequence
  Description of Artificial Sequence: Synthetic peptide
  Seed: SIGKVCRTLLAKSVF
SILKVMRVLLPKSVF

SEQ ID NO: 269479 - protein, 15 aa, Artificial Sequence
  Description of Artificial Sequence: Synthetic peptide
  Seed: SIGKVCRTLLAKSVF
SILKVMRVLLQKSVF

SEQ ID NO: 269480 - protein, 15 aa, Artificial Sequence
  Description of Artificial Sequence: Synthetic peptide
  Seed: SIGKVCRTLLAKSVF
SILKVMRVLLSKSVF

SEQ ID NO: 269481 - protein, 15 aa, Artificial Sequence
  Description of Artificial Sequence: Synthetic peptide
  Seed: SIGKVCRTLLAKSVF
SILKVMRVLLTKSVF

SEQ ID NO: 269482 - protein, 15 aa, Artificial Sequence
  Description of Artificial Sequence: Synthetic peptide
  Seed: SIGKVCRTLLAKSVF
SILKVMRYLLAKSVF

SEQ ID NO: 269483 - protein, 15 aa, Artificial Sequence
  Description of Artificial Sequence: Synthetic peptide
  Seed: SIGKVCRTLLAKSVF
SILKVMRYLLSKSVF

SEQ ID NO: 269484 - protein, 15 aa, Artificial Sequence
  Description of Artificial Sequence: Synthetic peptide
  Seed: SIGKVCRTLLAKSVF
SILKVNRALLAKSVF

SEQ ID NO: 269485 - protein, 15 aa, Artificial Sequence
  Description of Artificial Sequence: Synthetic peptide
  Seed: SIGKVCRTLLAKSVF
SILKVNRALLGKSVF

SEQ ID NO: 269486 - protein, 15 aa, Artificial Sequence
  Description of Artificial Sequence: Synthetic peptide
  Seed: SIGKVCRTLLAKSVF
SILKVNRALLQKSVF

SEQ ID NO: 269487 - protein, 15 aa, Artificial Sequence
  Description of Artificial Sequence: Synthetic peptide
  Seed: SIGKVCRTLLAKSVF
SILKVNRALLSKSVF

SEQ ID NO: 269488 - protein, 15 aa, Artificial Sequence
  Description of Artificial Sequence: Synthetic peptide
  Seed: SIGKVCRTLLAKSVF
SILKVNRALLYKSVF

SEQ ID NO: 269489 - protein, 15 aa, Artificial Sequence
  Description of Artificial Sequence: Synthetic peptide
  Seed: SIGKVCRTLLAKSVF
SILKVNRGLLAKSVF

SEQ ID NO: 269490 - protein, 15 aa, Artificial Sequence
  Description of Artificial Sequence: Synthetic peptide
  Seed: SIGKVCRTLLAKSVF
SILKVNRGLLQKSVF

SEQ ID NO: 269491 - protein, 15 aa, Artificial Sequence
  Description of Artificial Sequence: Synthetic peptide
  Seed: SIGKVCRTLLAKSVF
SILKVNRGLLSKSVF

SEQ ID NO: 269492 - protein, 15 aa, Artificial Sequence
  Description of Artificial Sequence: Synthetic peptide
  Seed: SIGKVCRTLLAKSVF
SILKVNRHLLAKSVF

SEQ ID NO: 269493 - protein, 15 aa, Artificial Sequence
  Description of Artificial Sequence: Synthetic peptide
  Seed: SIGKVCRTLLAKSVF
SILKVNRHLLGKSVF

SEQ ID NO: 269494 - protein, 15 aa, Artificial Sequence
  Description of Artificial Sequence: Synthetic peptide
  Seed: SIGKVCRTLLAKSVF
SILKVNRHLLQKSVF

SEQ ID NO: 269495 - protein, 15 aa, Artificial Sequence
  Description of Artificial Sequence: Synthetic peptide
  Seed: SIGKVCRTLLAKSVF
SILKVNRHLLSKSVF

SEQ ID NO: 269496 - protein, 15 aa, Artificial Sequence
  Description of Artificial Sequence: Synthetic peptide
  Seed: SIGKVCRTLLAKSVF
SILKVNRILLAKSVF

SEQ ID NO: 269497 - protein, 15 aa, Artificial Sequence
  Description of Artificial Sequence: Synthetic peptide
  Seed: SIGKVCRTLLAKSVF
SILKVNRILLGKSVF

SEQ ID NO: 269498 - protein, 15 aa, Artificial Sequence
  Description of Artificial Sequence: Synthetic peptide
  Seed: SIGKVCRTLLAKSVF
SILKVNRILLQKSVF

SEQ ID NO: 269499 - protein, 15 aa, Artificial Sequence
  Description of Artificial Sequence: Synthetic peptide
  Seed: SIGKVCRTLLAKSVF
SILKVNRILLSKSVF

SEQ ID NO: 269500 - protein, 15 aa, Artificial Sequence
  Description of Artificial Sequence: Synthetic peptide
  Seed: SIGKVCRTLLAKSVF
SILKVNRKLLAKSVF

SEQ ID NO: 269501 - protein, 15 aa, Artificial Sequence
  Description of Artificial Sequence: Synthetic peptide
  Seed: SIGKVCRTLLAKSVF
SILKVNRKLLCKSVF

SEQ ID NO: 269502 - protein, 15 aa, Artificial Sequence
  Description of Artificial Sequence: Synthetic peptide
  Seed: SIGKVCRTLLAKSVF
SILKVNRKLLEKSVF

SEQ ID NO: 269503 - protein, 15 aa, Artificial Sequence
  Description of Artificial Sequence: Synthetic peptide
  Seed: SIGKVCRTLLAKSVF
SILKVNRKLLFKSVF

SEQ ID NO: 269504 - protein, 15 aa, Artificial Sequence
  Description of Artificial Sequence: Synthetic peptide
  Seed: SIGKVCRTLLAKSVF
SILKVNRKLLGKSVF

SEQ ID NO: 269505 - protein, 15 aa, Artificial Sequence
  Description of Artificial Sequence: Synthetic peptide
  Seed: SIGKVCRTLLAKSVF
SILKVNRKLLHKSVF

SEQ ID NO: 269506 - protein, 15 aa, Artificial Sequence
  Description of Artificial Sequence: Synthetic peptide
  Seed: SIGKVCRTLLAKSVF
SILKVNRKLLIKSVF

SEQ ID NO: 269507 - protein, 15 aa, Artificial Sequence
  Description of Artificial Sequence: Synthetic peptide
  Seed: SIGKVCRTLLAKSVF
SILKVNRKLLKKSVF

SEQ ID NO: 269508 - protein, 15 aa, Artificial Sequence
  Description of Artificial Sequence: Synthetic peptide
  Seed: SIGKVCRTLLAKSVF
SILKVNRKLLLKSVF

SEQ ID NO: 269509 - protein, 15 aa, Artificial Sequence
  Description of Artificial Sequence: Synthetic peptide
  Seed: SIGKVCRTLLAKSVF
SILKVNRKLLMKSVF

SEQ ID NO: 269510 - protein, 15 aa, Artificial Sequence
  Description of Artificial Sequence: Synthetic peptide
  Seed: SIGKVCRTLLAKSVF
SILKVNRKLLNKSVF

SEQ ID NO: 269511 - protein, 15 aa, Artificial Sequence
  Description of Artificial Sequence: Synthetic peptide
  Seed: SIGKVCRTLLAKSVF
SILKVNRKLLPKSVF

SEQ ID NO: 269512 - protein, 15 aa, Artificial Sequence
  Description of Artificial Sequence: Synthetic peptide
  Seed: SIGKVCRTLLAKSVF
SILKVNRKLLQKSVF

SEQ ID NO: 269513 - protein, 15 aa, Artificial Sequence
  Description of Artificial Sequence: Synthetic peptide
  Seed: SIGKVCRTLLAKSVF
SILKVNRKLLRKSVF

SEQ ID NO: 269514 - protein, 15 aa, Artificial Sequence
  Description of Artificial Sequence: Synthetic peptide
  Seed: SIGKVCRTLLAKSVF
SILKVNRKLLSKSVF

SEQ ID NO: 269515 - protein, 15 aa, Artificial Sequence
  Description of Artificial Sequence: Synthetic peptide
  Seed: SIGKVCRTLLAKSVF
SILKVNRKLLTKSVF

SEQ ID NO: 269516 - protein, 15 aa, Artificial Sequence
  Description of Artificial Sequence: Synthetic peptide
  Seed: SIGKVCRTLLAKSVF
SILKVNRKLLVKSVF

SEQ ID NO: 269517 - protein, 15 aa, Artificial Sequence
  Description of Artificial Sequence: Synthetic peptide
  Seed: SIGKVCRTLLAKSVF
SILKVNRKLLWKSVF

SEQ ID NO: 269518 - protein, 15 aa, Artificial Sequence
  Description of Artificial Sequence: Synthetic peptide
  Seed: SIGKVCRTLLAKSVF
SILKVNRKLLYKSVF

SEQ ID NO: 269519 - protein, 15 aa, Artificial Sequence
  Description of Artificial Sequence: Synthetic peptide
  Seed: SIGKVCRTLLAKSVF
SILKVNRNLLAKSVF

SEQ ID NO: 269520 - protein, 15 aa, Artificial Sequence
  Description of Artificial Sequence: Synthetic peptide
  Seed: SIGKVCRTLLAKSVF
SILKVNRNLLSKSVF

SEQ ID NO: 269521 - protein, 15 aa, Artificial Sequence
  Description of Artificial Sequence: Synthetic peptide
  Seed: SIGKVCRTLLAKSVF
SILKVNRPLLAKSVF

SEQ ID NO: 269522 - protein, 15 aa, Artificial Sequence
  Description of Artificial Sequence: Synthetic peptide
  Seed: SIGKVCRTLLAKSVF
SILKVNRPLLSKSVF

SEQ ID NO: 269523 - protein, 15 aa, Artificial Sequence
  Description of Artificial Sequence: Synthetic peptide
  Seed: SIGKVCRTLLAKSVF
SILKVNRQLLAKSVF

SEQ ID NO: 269524 - protein, 15 aa, Artificial Sequence
  Description of Artificial Sequence: Synthetic peptide
  Seed: SIGKVCRTLLAKSVF
SILKVNRQLLSKSVF

SEQ ID NO: 269525 - protein, 15 aa, Artificial Sequence
  Description of Artificial Sequence: Synthetic peptide
  Seed: SIGKVCRTLLAKSVF
SILKVNRRLLAKSVF

SEQ ID NO: 269526 - protein, 15 aa, Artificial Sequence
  Description of Artificial Sequence: Synthetic peptide
  Seed: SIGKVCRTLLAKSVF
SILKVNRRLLCKSVF

SEQ ID NO: 269527 - protein, 15 aa, Artificial Sequence
  Description of Artificial Sequence: Synthetic peptide
  Seed: SIGKVCRTLLAKSVF
SILKVNRRLLDKSVF

SEQ ID NO: 269528 - protein, 15 aa, Artificial Sequence
  Description of Artificial Sequence: Synthetic peptide
  Seed: SIGKVCRTLLAKSVF
SILKVNRRLLEKSVF

SEQ ID NO: 269529 - protein, 15 aa, Artificial Sequence
  Description of Artificial Sequence: Synthetic peptide
  Seed: SIGKVCRTLLAKSVF
SILKVNRRLLFKSVF

SEQ ID NO: 269530 - protein, 15 aa, Artificial Sequence
  Description of Artificial Sequence: Synthetic peptide
  Seed: SIGKVCRTLLAKSVF
SILKVNRRLLGKSVF

SEQ ID NO: 269531 - protein, 15 aa, Artificial Sequence
  Description of Artificial Sequence: Synthetic peptide
  Seed: SIGKVCRTLLAKSVF
SILKVNRRLLHKSVF

SEQ ID NO: 269532 - protein, 15 aa, Artificial Sequence
  Description of Artificial Sequence: Synthetic peptide
  Seed: SIGKVCRTLLAKSVF
SILKVNRRLLIKSVF

SEQ ID NO: 269533 - protein, 15 aa, Artificial Sequence
  Description of Artificial Sequence: Synthetic peptide
  Seed: SIGKVCRTLLAKSVF
SILKVNRRLLKKSVF

SEQ ID NO: 269534 - protein, 15 aa, Artificial Sequence
  Description of Artificial Sequence: Synthetic peptide
  Seed: SIGKVCRTLLAKSVF
SILKVNRRLLLKSVF

SEQ ID NO: 269535 - protein, 15 aa, Artificial Sequence
  Description of Artificial Sequence: Synthetic peptide
  Seed: SIGKVCRTLLAKSVF
SILKVNRRLLMKSVF

SEQ ID NO: 269536 - protein, 15 aa, Artificial Sequence
  Description of Artificial Sequence: Synthetic peptide
  Seed: SIGKVCRTLLAKSVF
SILKVNRRLLNKSVF

SEQ ID NO: 269537 - protein, 15 aa, Artificial Sequence
  Description of Artificial Sequence: Synthetic peptide
  Seed: SIGKVCRTLLAKSVF
SILKVNRRLLPKSVF

SEQ ID NO: 269538 - protein, 15 aa, Artificial Sequence
  Description of Artificial Sequence: Synthetic peptide
  Seed: SIGKVCRTLLAKSVF
SILKVNRRLLQKSVF

SEQ ID NO: 269539 - protein, 15 aa, Artificial Sequence
  Description of Artificial Sequence: Synthetic peptide
  Seed: SIGKVCRTLLAKSVF
SILKVNRRLLRKSVF

SEQ ID NO: 269540 - protein, 15 aa, Artificial Sequence
  Description of Artificial Sequence: Synthetic peptide
  Seed: SIGKVCRTLLAKSVF
SILKVNRRLLSKSVF

SEQ ID NO: 269541 - protein, 15 aa, Artificial Sequence
  Description of Artificial Sequence: Synthetic peptide
  Seed: SIGKVCRTLLAKSVF
SILKVNRRLLTKSVF

SEQ ID NO: 269542 - protein, 15 aa, Artificial Sequence
  Description of Artificial Sequence: Synthetic peptide
  Seed: SIGKVCRTLLAKSVF
SILKVNRRLLVKSVF

SEQ ID NO: 269543 - protein, 15 aa, Artificial Sequence
  Description of Artificial Sequence: Synthetic peptide
  Seed: SIGKVCRTLLAKSVF
SILKVNRRLLYKSVF

SEQ ID NO: 269544 - protein, 15 aa, Artificial Sequence
  Description of Artificial Sequence: Synthetic peptide
  Seed: SIGKVCRTLLAKSVF
SILKVNRSLLAKSVF

SEQ ID NO: 269545 - protein, 15 aa, Artificial Sequence
  Description of Artificial Sequence: Synthetic peptide
  Seed: SIGKVCRTLLAKSVF
SILKVNRSLLGKSVF

SEQ ID NO: 269546 - protein, 15 aa, Artificial Sequence
  Description of Artificial Sequence: Synthetic peptide
  Seed: SIGKVCRTLLAKSVF
SILKVNRSLLHKSVF

SEQ ID NO: 269547 - protein, 15 aa, Artificial Sequence
  Description of Artificial Sequence: Synthetic peptide
  Seed: SIGKVCRTLLAKSVF
SILKVNRSLLQKSVF

SEQ ID NO: 269548 - protein, 15 aa, Artificial Sequence
  Description of Artificial Sequence: Synthetic peptide
  Seed: SIGKVCRTLLAKSVF
SILKVNRSLLRKSVF

SEQ ID NO: 269549 - protein, 15 aa, Artificial Sequence
  Description of Artificial Sequence: Synthetic peptide
  Seed: SIGKVCRTLLAKSVF
SILKVNRSLLSKSVF

SEQ ID NO: 269550 - protein, 15 aa, Artificial Sequence
  Description of Artificial Sequence: Synthetic peptide
  Seed: SIGKVCRTLLAKSVF
SILKVNRTLLAKSVF

SEQ ID NO: 269551 - protein, 15 aa, Artificial Sequence
  Description of Artificial Sequence: Synthetic peptide
  Seed: SIGKVCRTLLAKSVF
SILKVNRTLLGKSVF

SEQ ID NO: 269552 - protein, 15 aa, Artificial Sequence
  Description of Artificial Sequence: Synthetic peptide
  Seed: SIGKVCRTLLAKSVF
SILKVNRTLLHKSVF

SEQ ID NO: 269553 - protein, 15 aa, Artificial Sequence
  Description of Artificial Sequence: Synthetic peptide
  Seed: SIGKVCRTLLAKSVF
SILKVNRTLLKKSVF

SEQ ID NO: 269554 - protein, 15 aa, Artificial Sequence
  Description of Artificial Sequence: Synthetic peptide
  Seed: SIGKVCRTLLAKSVF
SILKVNRTLLQKSVF

SEQ ID NO: 269555 - protein, 15 aa, Artificial Sequence
  Description of Artificial Sequence: Synthetic peptide
  Seed: SIGKVCRTLLAKSVF
SILKVNRTLLRKSVF

SEQ ID NO: 269556 - protein, 15 aa, Artificial Sequence
  Description of Artificial Sequence: Synthetic peptide
  Seed: SIGKVCRTLLAKSVF
SILKVNRTLLSKSVF

SEQ ID NO: 269557 - protein, 15 aa, Artificial Sequence
  Description of Artificial Sequence: Synthetic peptide
  Seed: SIGKVCRTLLAKSVF
SILKVNRVLLAKSVF

SEQ ID NO: 269558 - protein, 15 aa, Artificial Sequence
  Description of Artificial Sequence: Synthetic peptide
  Seed: SIGKVCRTLLAKSVF
SILKVNRVLLGKSVF

SEQ ID NO: 269559 - protein, 15 aa, Artificial Sequence
  Description of Artificial Sequence: Synthetic peptide
  Seed: SIGKVCRTLLAKSVF
SILKVNRVLLHKSVF

SEQ ID NO: 269560 - protein, 15 aa, Artificial Sequence
  Description of Artificial Sequence: Synthetic peptide
  Seed: SIGKVCRTLLAKSVF
SILKVNRVLLQKSVF

SEQ ID NO: 269561 - protein, 15 aa, Artificial Sequence
  Description of Artificial Sequence: Synthetic peptide
  Seed: SIGKVCRTLLAKSVF
SILKVNRVLLRKSVF

SEQ ID NO: 269562 - protein, 15 aa, Artificial Sequence
  Description of Artificial Sequence: Synthetic peptide
  Seed: SIGKVCRTLLAKSVF
SILKVNRVLLSKSVF

SEQ ID NO: 269563 - protein, 15 aa, Artificial Sequence
  Description of Artificial Sequence: Synthetic peptide
  Seed: SIGKVCRTLLAKSVF
SILKVQRALLAKSVF

SEQ ID NO: 269564 - protein, 15 aa, Artificial Sequence
  Description of Artificial Sequence: Synthetic peptide
  Seed: SIGKVCRTLLAKSVF
SILKVQRALLGKSVF

SEQ ID NO: 269565 - protein, 15 aa, Artificial Sequence
  Description of Artificial Sequence: Synthetic peptide
  Seed: SIGKVCRTLLAKSVF
SILKVQRALLHKSVF

SEQ ID NO: 269566 - protein, 15 aa, Artificial Sequence
  Description of Artificial Sequence: Synthetic peptide
  Seed: SIGKVCRTLLAKSVF
SILKVQRALLQKSVF

SEQ ID NO: 269567 - protein, 15 aa, Artificial Sequence
  Description of Artificial Sequence: Synthetic peptide
  Seed: SIGKVCRTLLAKSVF
SILKVQRALLRKSVF

SEQ ID NO: 269568 - protein, 15 aa, Artificial Sequence
  Description of Artificial Sequence: Synthetic peptide
  Seed: SIGKVCRTLLAKSVF
SILKVQRALLSKSVF

SEQ ID NO: 269569 - protein, 15 aa, Artificial Sequence
  Description of Artificial Sequence: Synthetic peptide
  Seed: SIGKVCRTLLAKSVF
SILKVQRALLVKSVF

SEQ ID NO: 269570 - protein, 15 aa, Artificial Sequence
  Description of Artificial Sequence: Synthetic peptide
  Seed: SIGKVCRTLLAKSVF
SILKVQRALLYKSVF

SEQ ID NO: 269571 - protein, 15 aa, Artificial Sequence
  Description of Artificial Sequence: Synthetic peptide
  Seed: SIGKVCRTLLAKSVF
SILKVQRGLLAKSVF

SEQ ID NO: 269572 - protein, 15 aa, Artificial Sequence
  Description of Artificial Sequence: Synthetic peptide
  Seed: SIGKVCRTLLAKSVF
SILKVQRGLLGKSVF

SEQ ID NO: 269573 - protein, 15 aa, Artificial Sequence
  Description of Artificial Sequence: Synthetic peptide
  Seed: SIGKVCRTLLAKSVF
SILKVQRGLLQKSVF

SEQ ID NO: 269574 - protein, 15 aa, Artificial Sequence
  Description of Artificial Sequence: Synthetic peptide
  Seed: SIGKVCRTLLAKSVF
SILKVQRGLLSKSVF

SEQ ID NO: 269575 - protein, 15 aa, Artificial Sequence
  Description of Artificial Sequence: Synthetic peptide
  Seed: SIGKVCRTLLAKSVF
SILKVQRHLLAKSVF

SEQ ID NO: 269576 - protein, 15 aa, Artificial Sequence
  Description of Artificial Sequence: Synthetic peptide
  Seed: SIGKVCRTLLAKSVF
SILKVQRHLLGKSVF

SEQ ID NO: 269577 - protein, 15 aa, Artificial Sequence
  Description of Artificial Sequence: Synthetic peptide
  Seed: SIGKVCRTLLAKSVF
SILKVQRHLLHKSVF

SEQ ID NO: 269578 - protein, 15 aa, Artificial Sequence
  Description of Artificial Sequence: Synthetic peptide
  Seed: SIGKVCRTLLAKSVF
SILKVQRHLLIKSVF

SEQ ID NO: 269579 - protein, 15 aa, Artificial Sequence
  Description of Artificial Sequence: Synthetic peptide
  Seed: SIGKVCRTLLAKSVF
SILKVQRHLLLKSVF

SEQ ID NO: 269580 - protein, 15 aa, Artificial Sequence
  Description of Artificial Sequence: Synthetic peptide
  Seed: SIGKVCRTLLAKSVF
SILKVQRHLLMKSVF

SEQ ID NO: 269581 - protein, 15 aa, Artificial Sequence
  Description of Artificial Sequence: Synthetic peptide
  Seed: SIGKVCRTLLAKSVF
SILKVQRHLLNKSVF

SEQ ID NO: 269582 - protein, 15 aa, Artificial Sequence
  Description of Artificial Sequence: Synthetic peptide
  Seed: SIGKVCRTLLAKSVF
SILKVQRHLLQKSVF

SEQ ID NO: 269583 - protein, 15 aa, Artificial Sequence
  Description of Artificial Sequence: Synthetic peptide
  Seed: SIGKVCRTLLAKSVF
SILKVQRHLLRKSVF

SEQ ID NO: 269584 - protein, 15 aa, Artificial Sequence
  Description of Artificial Sequence: Synthetic peptide
  Seed: SIGKVCRTLLAKSVF
SILKVQRHLLSKSVF

SEQ ID NO: 269585 - protein, 15 aa, Artificial Sequence
  Description of Artificial Sequence: Synthetic peptide
  Seed: SIGKVCRTLLAKSVF
SILKVQRHLLTKSVF

SEQ ID NO: 269586 - protein, 15 aa, Artificial Sequence
  Description of Artificial Sequence: Synthetic peptide
  Seed: SIGKVCRTLLAKSVF
SILKVQRHLLVKSVF

SEQ ID NO: 269587 - protein, 15 aa, Artificial Sequence
  Description of Artificial Sequence: Synthetic peptide
  Seed: SIGKVCRTLLAKSVF
SILKVQRHLLYKSVF

SEQ ID NO: 269588 - protein, 15 aa, Artificial Sequence
  Description of Artificial Sequence: Synthetic peptide
  Seed: SIGKVCRTLLAKSVF
SILKVQRILLAKSVF

SEQ ID NO: 269589 - protein, 15 aa, Artificial Sequence
  Description of Artificial Sequence: Synthetic peptide
  Seed: SIGKVCRTLLAKSVF
SILKVQRILLGKSVF

SEQ ID NO: 269590 - protein, 15 aa, Artificial Sequence
  Description of Artificial Sequence: Synthetic peptide
  Seed: SIGKVCRTLLAKSVF
SILKVQRILLQKSVF

SEQ ID NO: 269591 - protein, 15 aa, Artificial Sequence
  Description of Artificial Sequence: Synthetic peptide
  Seed: SIGKVCRTLLAKSVF
SILKVQRILLRKSVF

SEQ ID NO: 269592 - protein, 15 aa, Artificial Sequence
  Description of Artificial Sequence: Synthetic peptide
  Seed: SIGKVCRTLLAKSVF
SILKVQRILLSKSVF

SEQ ID NO: 269593 - protein, 15 aa, Artificial Sequence
  Description of Artificial Sequence: Synthetic peptide
  Seed: SIGKVCRTLLAKSVF
SILKVQRKLLAKSVF

SEQ ID NO: 269594 - protein, 15 aa, Artificial Sequence
  Description of Artificial Sequence: Synthetic peptide
  Seed: SIGKVCRTLLAKSVF
SILKVQRKLLCKSVF

SEQ ID NO: 269595 - protein, 15 aa, Artificial Sequence
  Description of Artificial Sequence: Synthetic peptide
  Seed: SIGKVCRTLLAKSVF
SILKVQRKLLDKSVF

SEQ ID NO: 269596 - protein, 15 aa, Artificial Sequence
  Description of Artificial Sequence: Synthetic peptide
  Seed: SIGKVCRTLLAKSVF
SILKVQRKLLEKSVF

SEQ ID NO: 269597 - protein, 15 aa, Artificial Sequence
  Description of Artificial Sequence: Synthetic peptide
  Seed: SIGKVCRTLLAKSVF
SILKVQRKLLFKSVF

SEQ ID NO: 269598 - protein, 15 aa, Artificial Sequence
  Description of Artificial Sequence: Synthetic peptide
  Seed: SIGKVCRTLLAKSVF
SILKVQRKLLGKSVF

SEQ ID NO: 269599 - protein, 15 aa, Artificial Sequence
  Description of Artificial Sequence: Synthetic peptide
  Seed: SIGKVCRTLLAKSVF
SILKVQRKLLHKSVF

SEQ ID NO: 269600 - protein, 15 aa, Artificial Sequence
  Description of Artificial Sequence: Synthetic peptide
  Seed: SIGKVCRTLLAKSVF
SILKVQRKLLIKSVF

SEQ ID NO: 269601 - protein, 15 aa, Artificial Sequence
  Description of Artificial Sequence: Synthetic peptide
  Seed: SIGKVCRTLLAKSVF
SILKVQRKLLKKSVF

SEQ ID NO: 269602 - protein, 15 aa, Artificial Sequence
  Description of Artificial Sequence: Synthetic peptide
  Seed: SIGKVCRTLLAKSVF
SILKVQRKLLLKSVF

SEQ ID NO: 269603 - protein, 15 aa, Artificial Sequence
  Description of Artificial Sequence: Synthetic peptide
  Seed: SIGKVCRTLLAKSVF
SILKVQRKLLMKSVF

SEQ ID NO: 269604 - protein, 15 aa, Artificial Sequence
  Description of Artificial Sequence: Synthetic peptide
  Seed: SIGKVCRTLLAKSVF
SILKVQRKLLNKSVF

SEQ ID NO: 269605 - protein, 15 aa, Artificial Sequence
  Description of Artificial Sequence: Synthetic peptide
  Seed: SIGKVCRTLLAKSVF
SILKVQRKLLPKSVF

SEQ ID NO: 269606 - protein, 15 aa, Artificial Sequence
  Description of Artificial Sequence: Synthetic peptide
  Seed: SIGKVCRTLLAKSVF
SILKVQRKLLQKSVF

SEQ ID NO: 269607 - protein, 15 aa, Artificial Sequence
  Description of Artificial Sequence: Synthetic peptide
  Seed: SIGKVCRTLLAKSVF
SILKVQRKLLRKSVF

SEQ ID NO: 269608 - protein, 15 aa, Artificial Sequence
  Description of Artificial Sequence: Synthetic peptide
  Seed: SIGKVCRTLLAKSVF
SILKVQRKLLSKSVF

SEQ ID NO: 269609 - protein, 15 aa, Artificial Sequence
  Description of Artificial Sequence: Synthetic peptide
  Seed: SIGKVCRTLLAKSVF
SILKVQRKLLTKSVF

SEQ ID NO: 269610 - protein, 15 aa, Artificial Sequence
  Description of Artificial Sequence: Synthetic peptide
  Seed: SIGKVCRTLLAKSVF
SILKVQRKLLVKSVF

SEQ ID NO: 269611 - protein, 15 aa, Artificial Sequence
  Description of Artificial Sequence: Synthetic peptide
  Seed: SIGKVCRTLLAKSVF
SILKVQRKLLWKSVF

SEQ ID NO: 269612 - protein, 15 aa, Artificial Sequence
  Description of Artificial Sequence: Synthetic peptide
  Seed: SIGKVCRTLLAKSVF
SILKVQRKLLYKSVF

SEQ ID NO: 269613 - protein, 15 aa, Artificial Sequence
  Description of Artificial Sequence: Synthetic peptide
  Seed: SIGKVCRTLLAKSVF
SILKVQRLLLGKSVF

SEQ ID NO: 269614 - protein, 15 aa, Artificial Sequence
  Description of Artificial Sequence: Synthetic peptide
  Seed: SIGKVCRTLLAKSVF
SILKVQRLLLQKSVF

SEQ ID NO: 269615 - protein, 15 aa, Artificial Sequence
  Description of Artificial Sequence: Synthetic peptide
  Seed: SIGKVCRTLLAKSVF
SILKVQRMLLAKSVF

SEQ ID NO: 269616 - protein, 15 aa, Artificial Sequence
  Description of Artificial Sequence: Synthetic peptide
  Seed: SIGKVCRTLLAKSVF
SILKVQRMLLGKSVF

SEQ ID NO: 269617 - protein, 15 aa, Artificial Sequence
  Description of Artificial Sequence: Synthetic peptide
  Seed: SIGKVCRTLLAKSVF
SILKVQRMLLQKSVF

SEQ ID NO: 269618 - protein, 15 aa, Artificial Sequence
  Description of Artificial Sequence: Synthetic peptide
  Seed: SIGKVCRTLLAKSVF
SILKVQRMLLSKSVF

SEQ ID NO: 269619 - protein, 15 aa, Artificial Sequence
  Description of Artificial Sequence: Synthetic peptide
  Seed: SIGKVCRTLLAKSVF
SILKVQRNLLAKSVF

SEQ ID NO: 269620 - protein, 15 aa, Artificial Sequence
  Description of Artificial Sequence: Synthetic peptide
  Seed: SIGKVCRTLLAKSVF
SILKVQRNLLGKSVF

SEQ ID NO: 269621 - protein, 15 aa, Artificial Sequence
  Description of Artificial Sequence: Synthetic peptide
  Seed: SIGKVCRTLLAKSVF
SILKVQRNLLHKSVF

SEQ ID NO: 269622 - protein, 15 aa, Artificial Sequence
  Description of Artificial Sequence: Synthetic peptide
  Seed: SIGKVCRTLLAKSVF
SILKVQRNLLMKSVF

SEQ ID NO: 269623 - protein, 15 aa, Artificial Sequence
  Description of Artificial Sequence: Synthetic peptide
  Seed: SIGKVCRTLLAKSVF
SILKVQRNLLQKSVF

SEQ ID NO: 269624 - protein, 15 aa, Artificial Sequence
  Description of Artificial Sequence: Synthetic peptide
  Seed: SIGKVCRTLLAKSVF
SILKVQRNLLRKSVF

SEQ ID NO: 269625 - protein, 15 aa, Artificial Sequence
  Description of Artificial Sequence: Synthetic peptide
  Seed: SIGKVCRTLLAKSVF
SILKVQRNLLSKSVF

SEQ ID NO: 269626 - protein, 15 aa, Artificial Sequence
  Description of Artificial Sequence: Synthetic peptide
  Seed: SIGKVCRTLLAKSVF
SILKVQRNLLTKSVF

SEQ ID NO: 269627 - protein, 15 aa, Artificial Sequence
  Description of Artificial Sequence: Synthetic peptide
  Seed: SIGKVCRTLLAKSVF
SILKVQRNLLVKSVF

SEQ ID NO: 269628 - protein, 15 aa, Artificial Sequence
  Description of Artificial Sequence: Synthetic peptide
  Seed: SIGKVCRTLLAKSVF
SILKVQRNLLYKSVF

SEQ ID NO: 269629 - protein, 15 aa, Artificial Sequence
  Description of Artificial Sequence: Synthetic peptide
  Seed: SIGKVCRTLLAKSVF
SILKVQRPLLAKSVF

SEQ ID NO: 269630 - protein, 15 aa, Artificial Sequence
  Description of Artificial Sequence: Synthetic peptide
  Seed: SIGKVCRTLLAKSVF
SILKVQRPLLGKSVF

SEQ ID NO: 269631 - protein, 15 aa, Artificial Sequence
  Description of Artificial Sequence: Synthetic peptide
  Seed: SIGKVCRTLLAKSVF
SILKVQRPLLQKSVF

SEQ ID NO: 269632 - protein, 15 aa, Artificial Sequence
  Description of Artificial Sequence: Synthetic peptide
  Seed: SIGKVCRTLLAKSVF
SILKVQRPLLRKSVF

SEQ ID NO: 269633 - protein, 15 aa, Artificial Sequence
  Description of Artificial Sequence: Synthetic peptide
  Seed: SIGKVCRTLLAKSVF
SILKVQRPLLSKSVF

SEQ ID NO: 269634 - protein, 15 aa, Artificial Sequence
  Description of Artificial Sequence: Synthetic peptide
  Seed: SIGKVCRTLLAKSVF
SILKVQRQLLAKSVF

SEQ ID NO: 269635 - protein, 15 aa, Artificial Sequence
  Description of Artificial Sequence: Synthetic peptide
  Seed: SIGKVCRTLLAKSVF
SILKVQRQLLGKSVF

SEQ ID NO: 269636 - protein, 15 aa, Artificial Sequence
  Description of Artificial Sequence: Synthetic peptide
  Seed: SIGKVCRTLLAKSVF
SILKVQRQLLHKSVF

SEQ ID NO: 269637 - protein, 15 aa, Artificial Sequence
  Description of Artificial Sequence: Synthetic peptide
  Seed: SIGKVCRTLLAKSVF
SILKVQRQLLQKSVF

SEQ ID NO: 269638 - protein, 15 aa, Artificial Sequence
  Description of Artificial Sequence: Synthetic peptide
  Seed: SIGKVCRTLLAKSVF
SILKVQRQLLRKSVF

SEQ ID NO: 269639 - protein, 15 aa, Artificial Sequence
  Description of Artificial Sequence: Synthetic peptide
  Seed: SIGKVCRTLLAKSVF
SILKVQRQLLSKSVF

SEQ ID NO: 269640 - protein, 15 aa, Artificial Sequence
  Description of Artificial Sequence: Synthetic peptide
  Seed: SIGKVCRTLLAKSVF
SILKVQRRLLAKSVF

SEQ ID NO: 269641 - protein, 15 aa, Artificial Sequence
  Description of Artificial Sequence: Synthetic peptide
  Seed: SIGKVCRTLLAKSVF
SILKVQRRLLCKSVF

SEQ ID NO: 269642 - protein, 15 aa, Artificial Sequence
  Description of Artificial Sequence: Synthetic peptide
  Seed: SIGKVCRTLLAKSVF
SILKVQRRLLDKSVF

SEQ ID NO: 269643 - protein, 15 aa, Artificial Sequence
  Description of Artificial Sequence: Synthetic peptide
  Seed: SIGKVCRTLLAKSVF
SILKVQRRLLEKSVF

SEQ ID NO: 269644 - protein, 15 aa, Artificial Sequence
  Description of Artificial Sequence: Synthetic peptide
  Seed: SIGKVCRTLLAKSVF
SILKVQRRLLFKSVF

SEQ ID NO: 269645 - protein, 15 aa, Artificial Sequence
  Description of Artificial Sequence: Synthetic peptide
  Seed: SIGKVCRTLLAKSVF
SILKVQRRLLGKSVF

SEQ ID NO: 269646 - protein, 15 aa, Artificial Sequence
  Description of Artificial Sequence: Synthetic peptide
  Seed: SIGKVCRTLLAKSVF
SILKVQRRLLHKSVF

SEQ ID NO: 269647 - protein, 15 aa, Artificial Sequence
  Description of Artificial Sequence: Synthetic peptide
  Seed: SIGKVCRTLLAKSVF
SILKVQRRLLIKSVF

SEQ ID NO: 269648 - protein, 15 aa, Artificial Sequence
  Description of Artificial Sequence: Synthetic peptide
  Seed: SIGKVCRTLLAKSVF
SILKVQRRLLKKSVF

SEQ ID NO: 269649 - protein, 15 aa, Artificial Sequence
  Description of Artificial Sequence: Synthetic peptide
  Seed: SIGKVCRTLLAKSVF
SILKVQRRLLLKSVF

SEQ ID NO: 269650 - protein, 15 aa, Artificial Sequence
  Description of Artificial Sequence: Synthetic peptide
  Seed: SIGKVCRTLLAKSVF
SILKVQRRLLMKSVF

SEQ ID NO: 269651 - protein, 15 aa, Artificial Sequence
  Description of Artificial Sequence: Synthetic peptide
  Seed: SIGKVCRTLLAKSVF
SILKVQRRLLNKSVF

SEQ ID NO: 269652 - protein, 15 aa, Artificial Sequence
  Description of Artificial Sequence: Synthetic peptide
  Seed: SIGKVCRTLLAKSVF
SILKVQRRLLPKSVF

SEQ ID NO: 269653 - protein, 15 aa, Artificial Sequence
  Description of Artificial Sequence: Synthetic peptide
  Seed: SIGKVCRTLLAKSVF
SILKVQRRLLQKSVF

SEQ ID NO: 269654 - protein, 15 aa, Artificial Sequence
  Description of Artificial Sequence: Synthetic peptide
  Seed: SIGKVCRTLLAKSVF
SILKVQRRLLRKSVF

SEQ ID NO: 269655 - protein, 15 aa, Artificial Sequence
  Description of Artificial Sequence: Synthetic peptide
  Seed: SIGKVCRTLLAKSVF
SILKVQRRLLSKSVF

SEQ ID NO: 269656 - protein, 15 aa, Artificial Sequence
  Description of Artificial Sequence: Synthetic peptide
  Seed: SIGKVCRTLLAKSVF
SILKVQRRLLTKSVF

SEQ ID NO: 269657 - protein, 15 aa, Artificial Sequence
  Description of Artificial Sequence: Synthetic peptide
  Seed: SIGKVCRTLLAKSVF
SILKVQRRLLVKSVF

SEQ ID NO: 269658 - protein, 15 aa, Artificial Sequence
  Description of Artificial Sequence: Synthetic peptide
  Seed: SIGKVCRTLLAKSVF
SILKVQRRLLWKSVF

SEQ ID NO: 269659 - protein, 15 aa, Artificial Sequence
  Description of Artificial Sequence: Synthetic peptide
  Seed: SIGKVCRTLLAKSVF
SILKVQRRLLYKSVF

SEQ ID NO: 269660 - protein, 15 aa, Artificial Sequence
  Description of Artificial Sequence: Synthetic peptide
  Seed: SIGKVCRTLLAKSVF
SILKVQRSLLAKSVF

SEQ ID NO: 269661 - protein, 15 aa, Artificial Sequence
  Description of Artificial Sequence: Synthetic peptide
  Seed: SIGKVCRTLLAKSVF
SILKVQRSLLGKSVF

SEQ ID NO: 269662 - protein, 15 aa, Artificial Sequence
  Description of Artificial Sequence: Synthetic peptide
  Seed: SIGKVCRTLLAKSVF
SILKVQRSLLHKSVF

SEQ ID NO: 269663 - protein, 15 aa, Artificial Sequence
  Description of Artificial Sequence: Synthetic peptide
  Seed: SIGKVCRTLLAKSVF
SILKVQRSLLIKSVF

SEQ ID NO: 269664 - protein, 15 aa, Artificial Sequence
  Description of Artificial Sequence: Synthetic peptide
  Seed: SIGKVCRTLLAKSVF
SILKVQRSLLKKSVF

SEQ ID NO: 269665 - protein, 15 aa, Artificial Sequence
  Description of Artificial Sequence: Synthetic peptide
  Seed: SIGKVCRTLLAKSVF
SILKVQRSLLLKSVF

SEQ ID NO: 269666 - protein, 15 aa, Artificial Sequence
  Description of Artificial Sequence: Synthetic peptide
  Seed: SIGKVCRTLLAKSVF
SILKVQRSLLMKSVF

SEQ ID NO: 269667 - protein, 15 aa, Artificial Sequence
  Description of Artificial Sequence: Synthetic peptide
  Seed: SIGKVCRTLLAKSVF
SILKVQRSLLNKSVF

SEQ ID NO: 269668 - protein, 15 aa, Artificial Sequence
  Description of Artificial Sequence: Synthetic peptide
  Seed: SIGKVCRTLLAKSVF
SILKVQRSLLQKSVF

SEQ ID NO: 269669 - protein, 15 aa, Artificial Sequence
  Description of Artificial Sequence: Synthetic peptide
  Seed: SIGKVCRTLLAKSVF
SILKVQRSLLRKSVF

SEQ ID NO: 269670 - protein, 15 aa, Artificial Sequence
  Description of Artificial Sequence: Synthetic peptide
  Seed: SIGKVCRTLLAKSVF
SILKVQRSLLSKSVF

SEQ ID NO: 269671 - protein, 15 aa, Artificial Sequence
  Description of Artificial Sequence: Synthetic peptide
  Seed: SIGKVCRTLLAKSVF
SILKVQRSLLTKSVF

SEQ ID NO: 269672 - protein, 15 aa, Artificial Sequence
  Description of Artificial Sequence: Synthetic peptide
  Seed: SIGKVCRTLLAKSVF
SILKVQRSLLVKSVF

SEQ ID NO: 269673 - protein, 15 aa, Artificial Sequence
  Description of Artificial Sequence: Synthetic peptide
  Seed: SIGKVCRTLLAKSVF
SILKVQRSLLYKSVF

SEQ ID NO: 269674 - protein, 15 aa, Artificial Sequence
  Description of Artificial Sequence: Synthetic peptide
  Seed: SIGKVCRTLLAKSVF
SILKVQRTLLAKSVF

SEQ ID NO: 269675 - protein, 15 aa, Artificial Sequence
  Description of Artificial Sequence: Synthetic peptide
  Seed: SIGKVCRTLLAKSVF
SILKVQRTLLGKSVF

SEQ ID NO: 269676 - protein, 15 aa, Artificial Sequence
  Description of Artificial Sequence: Synthetic peptide
  Seed: SIGKVCRTLLAKSVF
SILKVQRTLLHKSVF

SEQ ID NO: 269677 - protein, 15 aa, Artificial Sequence
  Description of Artificial Sequence: Synthetic peptide
  Seed: SIGKVCRTLLAKSVF
SILKVQRTLLKKSVF

SEQ ID NO: 269678 - protein, 15 aa, Artificial Sequence
  Description of Artificial Sequence: Synthetic peptide
  Seed: SIGKVCRTLLAKSVF
SILKVQRTLLMKSVF

SEQ ID NO: 269679 - protein, 15 aa, Artificial Sequence
  Description of Artificial Sequence: Synthetic peptide
  Seed: SIGKVCRTLLAKSVF
SILKVQRTLLNKSVF

SEQ ID NO: 269680 - protein, 15 aa, Artificial Sequence
  Description of Artificial Sequence: Synthetic peptide
  Seed: SIGKVCRTLLAKSVF
SILKVQRTLLQKSVF

SEQ ID NO: 269681 - protein, 15 aa, Artificial Sequence
  Description of Artificial Sequence: Synthetic peptide
  Seed: SIGKVCRTLLAKSVF
SILKVQRTLLRKSVF

SEQ ID NO: 269682 - protein, 15 aa, Artificial Sequence
  Description of Artificial Sequence: Synthetic peptide
  Seed: SIGKVCRTLLAKSVF
SILKVQRTLLSKSVF

SEQ ID NO: 269683 - protein, 15 aa, Artificial Sequence
  Description of Artificial Sequence: Synthetic peptide
  Seed: SIGKVCRTLLAKSVF
SILKVQRTLLTKSVF

SEQ ID NO: 269684 - protein, 15 aa, Artificial Sequence
  Description of Artificial Sequence: Synthetic peptide
  Seed: SIGKVCRTLLAKSVF
SILKVQRTLLVKSVF

SEQ ID NO: 269685 - protein, 15 aa, Artificial Sequence
  Description of Artificial Sequence: Synthetic peptide
  Seed: SIGKVCRTLLAKSVF
SILKVQRTLLYKSVF

SEQ ID NO: 269686 - protein, 15 aa, Artificial Sequence
  Description of Artificial Sequence: Synthetic peptide
  Seed: SIGKVCRTLLAKSVF
SILKVQRVLLAKSVF

SEQ ID NO: 269687 - protein, 15 aa, Artificial Sequence
  Description of Artificial Sequence: Synthetic peptide
  Seed: SIGKVCRTLLAKSVF
SILKVQRVLLGKSVF

SEQ ID NO: 269688 - protein, 15 aa, Artificial Sequence
  Description of Artificial Sequence: Synthetic peptide
  Seed: SIGKVCRTLLAKSVF
SILKVQRVLLHKSVF

SEQ ID NO: 269689 - protein, 15 aa, Artificial Sequence
  Description of Artificial Sequence: Synthetic peptide
  Seed: SIGKVCRTLLAKSVF
SILKVQRVLLKKSVF

SEQ ID NO: 269690 - protein, 15 aa, Artificial Sequence
  Description of Artificial Sequence: Synthetic peptide
  Seed: SIGKVCRTLLAKSVF
SILKVQRVLLQKSVF

SEQ ID NO: 269691 - protein, 15 aa, Artificial Sequence
  Description of Artificial Sequence: Synthetic peptide
  Seed: SIGKVCRTLLAKSVF
SILKVQRVLLRKSVF

SEQ ID NO: 269692 - protein, 15 aa, Artificial Sequence
  Description of Artificial Sequence: Synthetic peptide
  Seed: SIGKVCRTLLAKSVF
SILKVQRVLLSKSVF

SEQ ID NO: 269693 - protein, 15 aa, Artificial Sequence
  Description of Artificial Sequence: Synthetic peptide
  Seed: SIGKVCRTLLAKSVF
SILKVRRALLAKSVF

SEQ ID NO: 269694 - protein, 15 aa, Artificial Sequence
  Description of Artificial Sequence: Synthetic peptide
  Seed: SIGKVCRTLLAKSVF
SILKVRRALLDKSVF

SEQ ID NO: 269695 - protein, 15 aa, Artificial Sequence
  Description of Artificial Sequence: Synthetic peptide
  Seed: SIGKVCRTLLAKSVF
SILKVRRALLEKSVF

SEQ ID NO: 269696 - protein, 15 aa, Artificial Sequence
  Description of Artificial Sequence: Synthetic peptide
  Seed: SIGKVCRTLLAKSVF
SILKVRRALLGKSVF

SEQ ID NO: 269697 - protein, 15 aa, Artificial Sequence
  Description of Artificial Sequence: Synthetic peptide
  Seed: SIGKVCRTLLAKSVF
SILKVRRALLHKSVF

SEQ ID NO: 269698 - protein, 15 aa, Artificial Sequence
  Description of Artificial Sequence: Synthetic peptide
  Seed: SIGKVCRTLLAKSVF
SILKVRRALLKKSVF

SEQ ID NO: 269699 - protein, 15 aa, Artificial Sequence
  Description of Artificial Sequence: Synthetic peptide
  Seed: SIGKVCRTLLAKSVF
SILKVRRALLMKSVF

SEQ ID NO: 269700 - protein, 15 aa, Artificial Sequence
  Description of Artificial Sequence: Synthetic peptide
  Seed: SIGKVCRTLLAKSVF
SILKVRRALLNKSVF

SEQ ID NO: 269701 - protein, 15 aa, Artificial Sequence
  Description of Artificial Sequence: Synthetic peptide
  Seed: SIGKVCRTLLAKSVF
SILKVRRALLQKSVF

SEQ ID NO: 269702 - protein, 15 aa, Artificial Sequence
  Description of Artificial Sequence: Synthetic peptide
  Seed: SIGKVCRTLLAKSVF
SILKVRRALLRKSVF

SEQ ID NO: 269703 - protein, 15 aa, Artificial Sequence
  Description of Artificial Sequence: Synthetic peptide
  Seed: SIGKVCRTLLAKSVF
SILKVRRALLSKSVF

SEQ ID NO: 269704 - protein, 15 aa, Artificial Sequence
  Description of Artificial Sequence: Synthetic peptide
  Seed: SIGKVCRTLLAKSVF
SILKVRRALLTKSVF

SEQ ID NO: 269705 - protein, 15 aa, Artificial Sequence
  Description of Artificial Sequence: Synthetic peptide
  Seed: SIGKVCRTLLAKSVF
SILKVRRALLVKSVF

SEQ ID NO: 269706 - protein, 15 aa, Artificial Sequence
  Description of Artificial Sequence: Synthetic peptide
  Seed: SIGKVCRTLLAKSVF
SILKVRRALLYKSVF

SEQ ID NO: 269707 - protein, 15 aa, Artificial Sequence
  Description of Artificial Sequence: Synthetic peptide
  Seed: SIGKVCRTLLAKSVF
SILKVRRELLAKSVF

SEQ ID NO: 269708 - protein, 15 aa, Artificial Sequence
  Description of Artificial Sequence: Synthetic peptide
  Seed: SIGKVCRTLLAKSVF
SILKVRRELLSKSVF

SEQ ID NO: 269709 - protein, 15 aa, Artificial Sequence
  Description of Artificial Sequence: Synthetic peptide
  Seed: SIGKVCRTLLAKSVF
SILKVRRHLLAKSVF

SEQ ID NO: 269710 - protein, 15 aa, Artificial Sequence
  Description of Artificial Sequence: Synthetic peptide
  Seed: SIGKVCRTLLAKSVF
SILKVRRHLLGKSVF

SEQ ID NO: 269711 - protein, 15 aa, Artificial Sequence
  Description of Artificial Sequence: Synthetic peptide
  Seed: SIGKVCRTLLAKSVF
SILKVRRHLLQKSVF

SEQ ID NO: 269712 - protein, 15 aa, Artificial Sequence
  Description of Artificial Sequence: Synthetic peptide
  Seed: SIGKVCRTLLAKSVF
SILKVRRHLLSKSVF

SEQ ID NO: 269713 - protein, 15 aa, Artificial Sequence
  Description of Artificial Sequence: Synthetic peptide
  Seed: SIGKVCRTLLAKSVF
SILKVRRILLHKSVF

SEQ ID NO: 269714 - protein, 15 aa, Artificial Sequence
  Description of Artificial Sequence: Synthetic peptide
  Seed: SIGKVCRTLLAKSVF
SILKVRRILLSKSVF

SEQ ID NO: 269715 - protein, 15 aa, Artificial Sequence
  Description of Artificial Sequence: Synthetic peptide
  Seed: SIGKVCRTLLAKSVF
SILKVRRKLLAKSVF

SEQ ID NO: 269716 - protein, 15 aa, Artificial Sequence
  Description of Artificial Sequence: Synthetic peptide
  Seed: SIGKVCRTLLAKSVF
SILKVRRKLLCKSVF

SEQ ID NO: 269717 - protein, 15 aa, Artificial Sequence
  Description of Artificial Sequence: Synthetic peptide
  Seed: SIGKVCRTLLAKSVF
SILKVRRKLLDKSVF

SEQ ID NO: 269718 - protein, 15 aa, Artificial Sequence
  Description of Artificial Sequence: Synthetic peptide
  Seed: SIGKVCRTLLAKSVF
SILKVRRKLLEKSVF

SEQ ID NO: 269719 - protein, 15 aa, Artificial Sequence
  Description of Artificial Sequence: Synthetic peptide
  Seed: SIGKVCRTLLAKSVF
SILKVRRKLLGKSVF

SEQ ID NO: 269720 - protein, 15 aa, Artificial Sequence
  Description of Artificial Sequence: Synthetic peptide
  Seed: SIGKVCRTLLAKSVF
SILKVRRKLLHKSVF

SEQ ID NO: 269721 - protein, 15 aa, Artificial Sequence
  Description of Artificial Sequence: Synthetic peptide
  Seed: SIGKVCRTLLAKSVF
SILKVRRKLLIKSVF

SEQ ID NO: 269722 - protein, 15 aa, Artificial Sequence
  Description of Artificial Sequence: Synthetic peptide
  Seed: SIGKVCRTLLAKSVF
SILKVRRKLLLKSVF

SEQ ID NO: 269723 - protein, 15 aa, Artificial Sequence
  Description of Artificial Sequence: Synthetic peptide
  Seed: SIGKVCRTLLAKSVF
SILKVRRKLLMKSVF

SEQ ID NO: 269724 - protein, 15 aa, Artificial Sequence
  Description of Artificial Sequence: Synthetic peptide
  Seed: SIGKVCRTLLAKSVF
SILKVRRKLLNKSVF

SEQ ID NO: 269725 - protein, 15 aa, Artificial Sequence
  Description of Artificial Sequence: Synthetic peptide
  Seed: SIGKVCRTLLAKSVF
SILKVRRKLLQKSVF

SEQ ID NO: 269726 - protein, 15 aa, Artificial Sequence
  Description of Artificial Sequence: Synthetic peptide
  Seed: SIGKVCRTLLAKSVF
SILKVRRKLLSKSVF

SEQ ID NO: 269727 - protein, 15 aa, Artificial Sequence
  Description of Artificial Sequence: Synthetic peptide
  Seed: SIGKVCRTLLAKSVF
SILKVRRKLLTKSVF

SEQ ID NO: 269728 - protein, 15 aa, Artificial Sequence
  Description of Artificial Sequence: Synthetic peptide
  Seed: SIGKVCRTLLAKSVF
SILKVRRKLLVKSVF

SEQ ID NO: 269729 - protein, 15 aa, Artificial Sequence
  Description of Artificial Sequence: Synthetic peptide
  Seed: SIGKVCRTLLAKSVF
SILKVRRKLLYKSVF

SEQ ID NO: 269730 - protein, 15 aa, Artificial Sequence
  Description of Artificial Sequence: Synthetic peptide
  Seed: SIGKVCRTLLAKSVF
SILKVRRNLLAKSVF

SEQ ID NO: 269731 - protein, 15 aa, Artificial Sequence
  Description of Artificial Sequence: Synthetic peptide
  Seed: SIGKVCRTLLAKSVF
SILKVRRNLLCKSVF

SEQ ID NO: 269732 - protein, 15 aa, Artificial Sequence
  Description of Artificial Sequence: Synthetic peptide
  Seed: SIGKVCRTLLAKSVF
SILKVRRNLLGKSVF

SEQ ID NO: 269733 - protein, 15 aa, Artificial Sequence
  Description of Artificial Sequence: Synthetic peptide
  Seed: SIGKVCRTLLAKSVF
SILKVRRNLLQKSVF

SEQ ID NO: 269734 - protein, 15 aa, Artificial Sequence
  Description of Artificial Sequence: Synthetic peptide
  Seed: SIGKVCRTLLAKSVF
SILKVRRNLLSKSVF

SEQ ID NO: 269735 - protein, 15 aa, Artificial Sequence
  Description of Artificial Sequence: Synthetic peptide
  Seed: SIGKVCRTLLAKSVF
SILKVRRPLLGKSVF

SEQ ID NO: 269736 - protein, 15 aa, Artificial Sequence
  Description of Artificial Sequence: Synthetic peptide
  Seed: SIGKVCRTLLAKSVF
SILKVRRPLLQKSVF

SEQ ID NO: 269737 - protein, 15 aa, Artificial Sequence
  Description of Artificial Sequence: Synthetic peptide
  Seed: SIGKVCRTLLAKSVF
SILKVRRQLLAKSVF

SEQ ID NO: 269738 - protein, 15 aa, Artificial Sequence
  Description of Artificial Sequence: Synthetic peptide
  Seed: SIGKVCRTLLAKSVF
SILKVRRQLLGKSVF

SEQ ID NO: 269739 - protein, 15 aa, Artificial Sequence
  Description of Artificial Sequence: Synthetic peptide
  Seed: SIGKVCRTLLAKSVF
SILKVRRQLLQKSVF

SEQ ID NO: 269740 - protein, 15 aa, Artificial Sequence
  Description of Artificial Sequence: Synthetic peptide
  Seed: SIGKVCRTLLAKSVF
SILKVRRQLLSKSVF

SEQ ID NO: 269741 - protein, 15 aa, Artificial Sequence
  Description of Artificial Sequence: Synthetic peptide
  Seed: SIGKVCRTLLAKSVF
SILKVRRRLLAKSVF

SEQ ID NO: 269742 - protein, 15 aa, Artificial Sequence
  Description of Artificial Sequence: Synthetic peptide
  Seed: SIGKVCRTLLAKSVF
SILKVRRRLLCKSVF

SEQ ID NO: 269743 - protein, 15 aa, Artificial Sequence
  Description of Artificial Sequence: Synthetic peptide
  Seed: SIGKVCRTLLAKSVF
SILKVRRRLLDKSVF

SEQ ID NO: 269744 - protein, 15 aa, Artificial Sequence
  Description of Artificial Sequence: Synthetic peptide
  Seed: SIGKVCRTLLAKSVF
SILKVRRRLLEKSVF

SEQ ID NO: 269745 - protein, 15 aa, Artificial Sequence
  Description of Artificial Sequence: Synthetic peptide
  Seed: SIGKVCRTLLAKSVF
SILKVRRRLLGKSVF

SEQ ID NO: 269746 - protein, 15 aa, Artificial Sequence
  Description of Artificial Sequence: Synthetic peptide
  Seed: SIGKVCRTLLAKSVF
SILKVRRRLLHKSVF

SEQ ID NO: 269747 - protein, 15 aa, Artificial Sequence
  Description of Artificial Sequence: Synthetic peptide
  Seed: SIGKVCRTLLAKSVF
SILKVRRRLLIKSVF

SEQ ID NO: 269748 - protein, 15 aa, Artificial Sequence
  Description of Artificial Sequence: Synthetic peptide
  Seed: SIGKVCRTLLAKSVF
SILKVRRRLLLKSVF

SEQ ID NO: 269749 - protein, 15 aa, Artificial Sequence
  Description of Artificial Sequence: Synthetic peptide
  Seed: SIGKVCRTLLAKSVF
SILKVRRRLLMKSVF

SEQ ID NO: 269750 - protein, 15 aa, Artificial Sequence
  Description of Artificial Sequence: Synthetic peptide
  Seed: SIGKVCRTLLAKSVF
SILKVRRRLLNKSVF

SEQ ID NO: 269751 - protein, 15 aa, Artificial Sequence
  Description of Artificial Sequence: Synthetic peptide
  Seed: SIGKVCRTLLAKSVF
SILKVRRRLLQKSVF

SEQ ID NO: 269752 - protein, 15 aa, Artificial Sequence
  Description of Artificial Sequence: Synthetic peptide
  Seed: SIGKVCRTLLAKSVF
SILKVRRRLLSKSVF

SEQ ID NO: 269753 - protein, 15 aa, Artificial Sequence
  Description of Artificial Sequence: Synthetic peptide
  Seed: SIGKVCRTLLAKSVF
SILKVRRRLLTKSVF

SEQ ID NO: 269754 - protein, 15 aa, Artificial Sequence
  Description of Artificial Sequence: Synthetic peptide
  Seed: SIGKVCRTLLAKSVF
SILKVRRRLLVKSVF

SEQ ID NO: 269755 - protein, 15 aa, Artificial Sequence
  Description of Artificial Sequence: Synthetic peptide
  Seed: SIGKVCRTLLAKSVF
SILKVRRRLLYKSVF

SEQ ID NO: 269756 - protein, 15 aa, Artificial Sequence
  Description of Artificial Sequence: Synthetic peptide
  Seed: SIGKVCRTLLAKSVF
SILKVRRSLLAKSVF

SEQ ID NO: 269757 - protein, 15 aa, Artificial Sequence
  Description of Artificial Sequence: Synthetic peptide
  Seed: SIGKVCRTLLAKSVF
SILKVRRSLLCKSVF

SEQ ID NO: 269758 - protein, 15 aa, Artificial Sequence
  Description of Artificial Sequence: Synthetic peptide
  Seed: SIGKVCRTLLAKSVF
SILKVRRSLLDKSVF

SEQ ID NO: 269759 - protein, 15 aa, Artificial Sequence
  Description of Artificial Sequence: Synthetic peptide
  Seed: SIGKVCRTLLAKSVF
SILKVRRSLLEKSVF

SEQ ID NO: 269760 - protein, 15 aa, Artificial Sequence
  Description of Artificial Sequence: Synthetic peptide
  Seed: SIGKVCRTLLAKSVF
SILKVRRSLLGKSVF

SEQ ID NO: 269761 - protein, 15 aa, Artificial Sequence
  Description of Artificial Sequence: Synthetic peptide
  Seed: SIGKVCRTLLAKSVF
SILKVRRSLLHKSVF

SEQ ID NO: 269762 - protein, 15 aa, Artificial Sequence
  Description of Artificial Sequence: Synthetic peptide
  Seed: SIGKVCRTLLAKSVF
SILKVRRSLLKKSVF

SEQ ID NO: 269763 - protein, 15 aa, Artificial Sequence
  Description of Artificial Sequence: Synthetic peptide
  Seed: SIGKVCRTLLAKSVF
SILKVRRSLLNKSVF

SEQ ID NO: 269764 - protein, 15 aa, Artificial Sequence
  Description of Artificial Sequence: Synthetic peptide
  Seed: SIGKVCRTLLAKSVF
SILKVRRSLLQKSVF

SEQ ID NO: 269765 - protein, 15 aa, Artificial Sequence
  Description of Artificial Sequence: Synthetic peptide
  Seed: SIGKVCRTLLAKSVF
SILKVRRSLLRKSVF

SEQ ID NO: 269766 - protein, 15 aa, Artificial Sequence
  Description of Artificial Sequence: Synthetic peptide
  Seed: SIGKVCRTLLAKSVF
SILKVRRSLLSKSVF

SEQ ID NO: 269767 - protein, 15 aa, Artificial Sequence
  Description of Artificial Sequence: Synthetic peptide
  Seed: SIGKVCRTLLAKSVF
SILKVRRSLLYKSVF

SEQ ID NO: 269768 - protein, 15 aa, Artificial Sequence
  Description of Artificial Sequence: Synthetic peptide
  Seed: SIGKVCRTLLAKSVF
SILKVRRTLLAKSVF

SEQ ID NO: 269769 - protein, 15 aa, Artificial Sequence
  Description of Artificial Sequence: Synthetic peptide
  Seed: SIGKVCRTLLAKSVF
SILKVRRTLLCKSVF

SEQ ID NO: 269770 - protein, 15 aa, Artificial Sequence
  Description of Artificial Sequence: Synthetic peptide
  Seed: SIGKVCRTLLAKSVF
SILKVRRTLLDKSVF

SEQ ID NO: 269771 - protein, 15 aa, Artificial Sequence
  Description of Artificial Sequence: Synthetic peptide
  Seed: SIGKVCRTLLAKSVF
SILKVRRTLLEKSVF

SEQ ID NO: 269772 - protein, 15 aa, Artificial Sequence
  Description of Artificial Sequence: Synthetic peptide
  Seed: SIGKVCRTLLAKSVF
SILKVRRTLLGKSVF

SEQ ID NO: 269773 - protein, 15 aa, Artificial Sequence
  Description of Artificial Sequence: Synthetic peptide
  Seed: SIGKVCRTLLAKSVF
SILKVRRTLLHKSVF

SEQ ID NO: 269774 - protein, 15 aa, Artificial Sequence
  Description of Artificial Sequence: Synthetic peptide
  Seed: SIGKVCRTLLAKSVF
SILKVRRTLLKKSVF

SEQ ID NO: 269775 - protein, 15 aa, Artificial Sequence
  Description of Artificial Sequence: Synthetic peptide
  Seed: SIGKVCRTLLAKSVF
SILKVRRTLLMKSVF

SEQ ID NO: 269776 - protein, 15 aa, Artificial Sequence
  Description of Artificial Sequence: Synthetic peptide
  Seed: SIGKVCRTLLAKSVF
SILKVRRTLLNKSVF

SEQ ID NO: 269777 - protein, 15 aa, Artificial Sequence
  Description of Artificial Sequence: Synthetic peptide
  Seed: SIGKVCRTLLAKSVF
SILKVRRTLLQKSVF

SEQ ID NO: 269778 - protein, 15 aa, Artificial Sequence
  Description of Artificial Sequence: Synthetic peptide
  Seed: SIGKVCRTLLAKSVF
SILKVRRTLLRKSVF

SEQ ID NO: 269779 - protein, 15 aa, Artificial Sequence
  Description of Artificial Sequence: Synthetic peptide
  Seed: SIGKVCRTLLAKSVF
SILKVRRTLLSKSVF

SEQ ID NO: 269780 - protein, 15 aa, Artificial Sequence
  Description of Artificial Sequence: Synthetic peptide
  Seed: SIGKVCRTLLAKSVF
SILKVRRTLLTKSVF

SEQ ID NO: 269781 - protein, 15 aa, Artificial Sequence
  Description of Artificial Sequence: Synthetic peptide
  Seed: SIGKVCRTLLAKSVF
SILKVRRTLLVKSVF

SEQ ID NO: 269782 - protein, 15 aa, Artificial Sequence
  Description of Artificial Sequence: Synthetic peptide
  Seed: SIGKVCRTLLAKSVF
SILKVRRTLLYKSVF

SEQ ID NO: 269783 - protein, 15 aa, Artificial Sequence
  Description of Artificial Sequence: Synthetic peptide
  Seed: SIGKVCRTLLAKSVF
SILKVRRVLLAKSVF

SEQ ID NO: 269784 - protein, 15 aa, Artificial Sequence
  Description of Artificial Sequence: Synthetic peptide
  Seed: SIGKVCRTLLAKSVF
SILKVRRVLLGKSVF

SEQ ID NO: 269785 - protein, 15 aa, Artificial Sequence
  Description of Artificial Sequence: Synthetic peptide
  Seed: SIGKVCRTLLAKSVF
SILKVRRVLLHKSVF

SEQ ID NO: 269786 - protein, 15 aa, Artificial Sequence
  Description of Artificial Sequence: Synthetic peptide
  Seed: SIGKVCRTLLAKSVF
SILKVRRVLLKKSVF

SEQ ID NO: 269787 - protein, 15 aa, Artificial Sequence
  Description of Artificial Sequence: Synthetic peptide
  Seed: SIGKVCRTLLAKSVF
SILKVRRVLLQKSVF

SEQ ID NO: 269788 - protein, 15 aa, Artificial Sequence
  Description of Artificial Sequence: Synthetic peptide
  Seed: SIGKVCRTLLAKSVF
SILKVRRVLLRKSVF

SEQ ID NO: 269789 - protein, 15 aa, Artificial Sequence
  Description of Artificial Sequence: Synthetic peptide
  Seed: SIGKVCRTLLAKSVF
SILKVRRVLLSKSVF

SEQ ID NO: 269790 - protein, 15 aa, Artificial Sequence
  Description of Artificial Sequence: Synthetic peptide
  Seed: SIGKVCRTLLAKSVF
SILKVSRALLAKSVF

SEQ ID NO: 269791 - protein, 15 aa, Artificial Sequence
  Description of Artificial Sequence: Synthetic peptide
  Seed: SIGKVCRTLLAKSVF
SILKVSRALLGKSVF

SEQ ID NO: 269792 - protein, 15 aa, Artificial Sequence
  Description of Artificial Sequence: Synthetic peptide
  Seed: SIGKVCRTLLAKSVF
SILKVSRALLQKSVF

SEQ ID NO: 269793 - protein, 15 aa, Artificial Sequence
  Description of Artificial Sequence: Synthetic peptide
  Seed: SIGKVCRTLLAKSVF
SILKVSRALLRKSVF

SEQ ID NO: 269794 - protein, 15 aa, Artificial Sequence
  Description of Artificial Sequence: Synthetic peptide
  Seed: SIGKVCRTLLAKSVF
SILKVSRALLSKSVF

SEQ ID NO: 269795 - protein, 15 aa, Artificial Sequence
  Description of Artificial Sequence: Synthetic peptide
  Seed: SIGKVCRTLLAKSVF
SILKVSRGLLGKSVF

SEQ ID NO: 269796 - protein, 15 aa, Artificial Sequence
  Description of Artificial Sequence: Synthetic peptide
  Seed: SIGKVCRTLLAKSVF
SILKVSRHLLAKSVF

SEQ ID NO: 269797 - protein, 15 aa, Artificial Sequence
  Description of Artificial Sequence: Synthetic peptide
  Seed: SIGKVCRTLLAKSVF
SILKVSRHLLGKSVF

SEQ ID NO: 269798 - protein, 15 aa, Artificial Sequence
  Description of Artificial Sequence: Synthetic peptide
  Seed: SIGKVCRTLLAKSVF
SILKVSRHLLQKSVF

SEQ ID NO: 269799 - protein, 15 aa, Artificial Sequence
  Description of Artificial Sequence: Synthetic peptide
  Seed: SIGKVCRTLLAKSVF
SILKVSRHLLSKSVF

SEQ ID NO: 269800 - protein, 15 aa, Artificial Sequence
  Description of Artificial Sequence: Synthetic peptide
  Seed: SIGKVCRTLLAKSVF
SILKVSRILLGKSVF

SEQ ID NO: 269801 - protein, 15 aa, Artificial Sequence
  Description of Artificial Sequence: Synthetic peptide
  Seed: SIGKVCRTLLAKSVF
SILKVSRILLQKSVF

SEQ ID NO: 269802 - protein, 15 aa, Artificial Sequence
  Description of Artificial Sequence: Synthetic peptide
  Seed: SIGKVCRTLLAKSVF
SILKVSRKLLAKSVF

SEQ ID NO: 269803 - protein, 15 aa, Artificial Sequence
  Description of Artificial Sequence: Synthetic peptide
  Seed: SIGKVCRTLLAKSVF
SILKVSRKLLCKSVF

SEQ ID NO: 269804 - protein, 15 aa, Artificial Sequence
  Description of Artificial Sequence: Synthetic peptide
  Seed: SIGKVCRTLLAKSVF
SILKVSRKLLDKSVF

SEQ ID NO: 269805 - protein, 15 aa, Artificial Sequence
  Description of Artificial Sequence: Synthetic peptide
  Seed: SIGKVCRTLLAKSVF
SILKVSRKLLEKSVF

SEQ ID NO: 269806 - protein, 15 aa, Artificial Sequence
  Description of Artificial Sequence: Synthetic peptide
  Seed: SIGKVCRTLLAKSVF
SILKVSRKLLFKSVF

SEQ ID NO: 269807 - protein, 15 aa, Artificial Sequence
  Description of Artificial Sequence: Synthetic peptide
  Seed: SIGKVCRTLLAKSVF
SILKVSRKLLGKSVF

SEQ ID NO: 269808 - protein, 15 aa, Artificial Sequence
  Description of Artificial Sequence: Synthetic peptide
  Seed: SIGKVCRTLLAKSVF
SILKVSRKLLHKSVF

SEQ ID NO: 269809 - protein, 15 aa, Artificial Sequence
  Description of Artificial Sequence: Synthetic peptide
  Seed: SIGKVCRTLLAKSVF
SILKVSRKLLIKSVF

SEQ ID NO: 269810 - protein, 15 aa, Artificial Sequence
  Description of Artificial Sequence: Synthetic peptide
  Seed: SIGKVCRTLLAKSVF
SILKVSRKLLKKSVF

SEQ ID NO: 269811 - protein, 15 aa, Artificial Sequence
  Description of Artificial Sequence: Synthetic peptide
  Seed: SIGKVCRTLLAKSVF
SILKVSRKLLLKSVF

SEQ ID NO: 269812 - protein, 15 aa, Artificial Sequence
  Description of Artificial Sequence: Synthetic peptide
  Seed: SIGKVCRTLLAKSVF
SILKVSRKLLMKSVF

SEQ ID NO: 269813 - protein, 15 aa, Artificial Sequence
  Description of Artificial Sequence: Synthetic peptide
  Seed: SIGKVCRTLLAKSVF
SILKVSRKLLNKSVF

SEQ ID NO: 269814 - protein, 15 aa, Artificial Sequence
  Description of Artificial Sequence: Synthetic peptide
  Seed: SIGKVCRTLLAKSVF
SILKVSRKLLPKSVF

SEQ ID NO: 269815 - protein, 15 aa, Artificial Sequence
  Description of Artificial Sequence: Synthetic peptide
  Seed: SIGKVCRTLLAKSVF
SILKVSRKLLQKSVF

SEQ ID NO: 269816 - protein, 15 aa, Artificial Sequence
  Description of Artificial Sequence: Synthetic peptide
  Seed: SIGKVCRTLLAKSVF
SILKVSRKLLRKSVF

SEQ ID NO: 269817 - protein, 15 aa, Artificial Sequence
  Description of Artificial Sequence: Synthetic peptide
  Seed: SIGKVCRTLLAKSVF
SILKVSRKLLSKSVF

SEQ ID NO: 269818 - protein, 15 aa, Artificial Sequence
  Description of Artificial Sequence: Synthetic peptide
  Seed: SIGKVCRTLLAKSVF
SILKVSRKLLTKSVF

SEQ ID NO: 269819 - protein, 15 aa, Artificial Sequence
  Description of Artificial Sequence: Synthetic peptide
  Seed: SIGKVCRTLLAKSVF
SILKVSRKLLVKSVF

SEQ ID NO: 269820 - protein, 15 aa, Artificial Sequence
  Description of Artificial Sequence: Synthetic peptide
  Seed: SIGKVCRTLLAKSVF
SILKVSRKLLWKSVF

SEQ ID NO: 269821 - protein, 15 aa, Artificial Sequence
  Description of Artificial Sequence: Synthetic peptide
  Seed: SIGKVCRTLLAKSVF
SILKVSRKLLYKSVF

SEQ ID NO: 269822 - protein, 15 aa, Artificial Sequence
  Description of Artificial Sequence: Synthetic peptide
  Seed: SIGKVCRTLLAKSVF
SILKVSRNLLAKSVF

SEQ ID NO: 269823 - protein, 15 aa, Artificial Sequence
  Description of Artificial Sequence: Synthetic peptide
  Seed: SIGKVCRTLLAKSVF
SILKVSRNLLGKSVF

SEQ ID NO: 269824 - protein, 15 aa, Artificial Sequence
  Description of Artificial Sequence: Synthetic peptide
  Seed: SIGKVCRTLLAKSVF
SILKVSRNLLQKSVF

SEQ ID NO: 269825 - protein, 15 aa, Artificial Sequence
  Description of Artificial Sequence: Synthetic peptide
  Seed: SIGKVCRTLLAKSVF
SILKVSRNLLSKSVF

SEQ ID NO: 269826 - protein, 15 aa, Artificial Sequence
  Description of Artificial Sequence: Synthetic peptide
  Seed: SIGKVCRTLLAKSVF
SILKVSRPLLAKSVF

SEQ ID NO: 269827 - protein, 15 aa, Artificial Sequence
  Description of Artificial Sequence: Synthetic peptide
  Seed: SIGKVCRTLLAKSVF
SILKVSRPLLGKSVF

SEQ ID NO: 269828 - protein, 15 aa, Artificial Sequence
  Description of Artificial Sequence: Synthetic peptide
  Seed: SIGKVCRTLLAKSVF
SILKVSRPLLQKSVF

SEQ ID NO: 269829 - protein, 15 aa, Artificial Sequence
  Description of Artificial Sequence: Synthetic peptide
  Seed: SIGKVCRTLLAKSVF
SILKVSRPLLSKSVF

SEQ ID NO: 269830 - protein, 15 aa, Artificial Sequence
  Description of Artificial Sequence: Synthetic peptide
  Seed: SIGKVCRTLLAKSVF
SILKVSRQLLAKSVF

SEQ ID NO: 269831 - protein, 15 aa, Artificial Sequence
  Description of Artificial Sequence: Synthetic peptide
  Seed: SIGKVCRTLLAKSVF
SILKVSRQLLGKSVF

SEQ ID NO: 269832 - protein, 15 aa, Artificial Sequence
  Description of Artificial Sequence: Synthetic peptide
  Seed: SIGKVCRTLLAKSVF
SILKVSRQLLQKSVF

SEQ ID NO: 269833 - protein, 15 aa, Artificial Sequence
  Description of Artificial Sequence: Synthetic peptide
  Seed: SIGKVCRTLLAKSVF
SILKVSRQLLSKSVF

SEQ ID NO: 269834 - protein, 15 aa, Artificial Sequence
  Description of Artificial Sequence: Synthetic peptide
  Seed: SIGKVCRTLLAKSVF
SILKVSRRLLAKSVF

SEQ ID NO: 269835 - protein, 15 aa, Artificial Sequence
  Description of Artificial Sequence: Synthetic peptide
  Seed: SIGKVCRTLLAKSVF
SILKVSRRLLCKSVF

SEQ ID NO: 269836 - protein, 15 aa, Artificial Sequence
  Description of Artificial Sequence: Synthetic peptide
  Seed: SIGKVCRTLLAKSVF
SILKVSRRLLDKSVF

SEQ ID NO: 269837 - protein, 15 aa, Artificial Sequence
  Description of Artificial Sequence: Synthetic peptide
  Seed: SIGKVCRTLLAKSVF
SILKVSRRLLEKSVF

SEQ ID NO: 269838 - protein, 15 aa, Artificial Sequence
  Description of Artificial Sequence: Synthetic peptide
  Seed: SIGKVCRTLLAKSVF
SILKVSRRLLFKSVF

SEQ ID NO: 269839 - protein, 15 aa, Artificial Sequence
  Description of Artificial Sequence: Synthetic peptide
  Seed: SIGKVCRTLLAKSVF
SILKVSRRLLGKSVF

SEQ ID NO: 269840 - protein, 15 aa, Artificial Sequence
  Description of Artificial Sequence: Synthetic peptide
  Seed: SIGKVCRTLLAKSVF
SILKVSRRLLHKSVF

SEQ ID NO: 269841 - protein, 15 aa, Artificial Sequence
  Description of Artificial Sequence: Synthetic peptide
  Seed: SIGKVCRTLLAKSVF
SILKVSRRLLIKSVF

SEQ ID NO: 269842 - protein, 15 aa, Artificial Sequence
  Description of Artificial Sequence: Synthetic peptide
  Seed: SIGKVCRTLLAKSVF
SILKVSRRLLKKSVF

SEQ ID NO: 269843 - protein, 15 aa, Artificial Sequence
  Description of Artificial Sequence: Synthetic peptide
  Seed: SIGKVCRTLLAKSVF
SILKVSRRLLLKSVF

SEQ ID NO: 269844 - protein, 15 aa, Artificial Sequence
  Description of Artificial Sequence: Synthetic peptide
  Seed: SIGKVCRTLLAKSVF
SILKVSRRLLMKSVF

SEQ ID NO: 269845 - protein, 15 aa, Artificial Sequence
  Description of Artificial Sequence: Synthetic peptide
  Seed: SIGKVCRTLLAKSVF
SILKVSRRLLNKSVF

SEQ ID NO: 269846 - protein, 15 aa, Artificial Sequence
  Description of Artificial Sequence: Synthetic peptide
  Seed: SIGKVCRTLLAKSVF
SILKVSRRLLPKSVF

SEQ ID NO: 269847 - protein, 15 aa, Artificial Sequence
  Description of Artificial Sequence: Synthetic peptide
  Seed: SIGKVCRTLLAKSVF
SILKVSRRLLQKSVF

SEQ ID NO: 269848 - protein, 15 aa, Artificial Sequence
  Description of Artificial Sequence: Synthetic peptide
  Seed: SIGKVCRTLLAKSVF
SILKVSRRLLRKSVF

SEQ ID NO: 269849 - protein, 15 aa, Artificial Sequence
  Description of Artificial Sequence: Synthetic peptide
  Seed: SIGKVCRTLLAKSVF
SILKVSRRLLSKSVF

SEQ ID NO: 269850 - protein, 15 aa, Artificial Sequence
  Description of Artificial Sequence: Synthetic peptide
  Seed: SIGKVCRTLLAKSVF
SILKVSRRLLTKSVF

SEQ ID NO: 269851 - protein, 15 aa, Artificial Sequence
  Description of Artificial Sequence: Synthetic peptide
  Seed: SIGKVCRTLLAKSVF
SILKVSRRLLVKSVF

SEQ ID NO: 269852 - protein, 15 aa, Artificial Sequence
  Description of Artificial Sequence: Synthetic peptide
  Seed: SIGKVCRTLLAKSVF
SILKVSRRLLWKSVF

SEQ ID NO: 269853 - protein, 15 aa, Artificial Sequence
  Description of Artificial Sequence: Synthetic peptide
  Seed: SIGKVCRTLLAKSVF
SILKVSRRLLYKSVF

SEQ ID NO: 269854 - protein, 15 aa, Artificial Sequence
  Description of Artificial Sequence: Synthetic peptide
  Seed: SIGKVCRTLLAKSVF
SILKVSRSLLAKSVF

SEQ ID NO: 269855 - protein, 15 aa, Artificial Sequence
  Description of Artificial Sequence: Synthetic peptide
  Seed: SIGKVCRTLLAKSVF
SILKVSRSLLGKSVF

SEQ ID NO: 269856 - protein, 15 aa, Artificial Sequence
  Description of Artificial Sequence: Synthetic peptide
  Seed: SIGKVCRTLLAKSVF
SILKVSRSLLQKSVF

SEQ ID NO: 269857 - protein, 15 aa, Artificial Sequence
  Description of Artificial Sequence: Synthetic peptide
  Seed: SIGKVCRTLLAKSVF
SILKVSRSLLRKSVF

SEQ ID NO: 269858 - protein, 15 aa, Artificial Sequence
  Description of Artificial Sequence: Synthetic peptide
  Seed: SIGKVCRTLLAKSVF
SILKVSRSLLSKSVF

SEQ ID NO: 269859 - protein, 15 aa, Artificial Sequence
  Description of Artificial Sequence: Synthetic peptide
  Seed: SIGKVCRTLLAKSVF
SILKVSRSLLYKSVF

SEQ ID NO: 269860 - protein, 15 aa, Artificial Sequence
  Description of Artificial Sequence: Synthetic peptide
  Seed: SIGKVCRTLLAKSVF
SILKVSRTLLAKSVF

SEQ ID NO: 269861 - protein, 15 aa, Artificial Sequence
  Description of Artificial Sequence: Synthetic peptide
  Seed: SIGKVCRTLLAKSVF
SILKVSRTLLGKSVF

SEQ ID NO: 269862 - protein, 15 aa, Artificial Sequence
  Description of Artificial Sequence: Synthetic peptide
  Seed: SIGKVCRTLLAKSVF
SILKVSRTLLHKSVF

SEQ ID NO: 269863 - protein, 15 aa, Artificial Sequence
  Description of Artificial Sequence: Synthetic peptide
  Seed: SIGKVCRTLLAKSVF
SILKVSRTLLKKSVF

SEQ ID NO: 269864 - protein, 15 aa, Artificial Sequence
  Description of Artificial Sequence: Synthetic peptide
  Seed: SIGKVCRTLLAKSVF
SILKVSRTLLQKSVF

SEQ ID NO: 269865 - protein, 15 aa, Artificial Sequence
  Description of Artificial Sequence: Synthetic peptide
  Seed: SIGKVCRTLLAKSVF
SILKVSRTLLRKSVF

SEQ ID NO: 269866 - protein, 15 aa, Artificial Sequence
  Description of Artificial Sequence: Synthetic peptide
  Seed: SIGKVCRTLLAKSVF
SILKVSRTLLSKSVF

SEQ ID NO: 269867 - protein, 15 aa, Artificial Sequence
  Description of Artificial Sequence: Synthetic peptide
  Seed: SIGKVCRTLLAKSVF
SILKVSRTLLTKSVF

SEQ ID NO: 269868 - protein, 15 aa, Artificial Sequence
  Description of Artificial Sequence: Synthetic peptide
  Seed: SIGKVCRTLLAKSVF
SILKVSRTLLYKSVF

SEQ ID NO: 269869 - protein, 15 aa, Artificial Sequence
  Description of Artificial Sequence: Synthetic peptide
  Seed: SIGKVCRTLLAKSVF
SILKVSRVLLAKSVF

SEQ ID NO: 269870 - protein, 15 aa, Artificial Sequence
  Description of Artificial Sequence: Synthetic peptide
  Seed: SIGKVCRTLLAKSVF
SILKVSRVLLGKSVF

SEQ ID NO: 269871 - protein, 15 aa, Artificial Sequence
  Description of Artificial Sequence: Synthetic peptide
  Seed: SIGKVCRTLLAKSVF
SILKVSRVLLQKSVF

SEQ ID NO: 269872 - protein, 15 aa, Artificial Sequence
  Description of Artificial Sequence: Synthetic peptide
  Seed: SIGKVCRTLLAKSVF
SILKVSRVLLSKSVF

SEQ ID NO: 269873 - protein, 15 aa, Artificial Sequence
  Description of Artificial Sequence: Synthetic peptide
  Seed: SIGKVCRTLLAKSVF
SILKVTRALLAKSVF

SEQ ID NO: 269874 - protein, 15 aa, Artificial Sequence
  Description of Artificial Sequence: Synthetic peptide
  Seed: SIGKVCRTLLAKSVF
SILKVTRALLGKSVF

SEQ ID NO: 269875 - protein, 15 aa, Artificial Sequence
  Description of Artificial Sequence: Synthetic peptide
  Seed: SIGKVCRTLLAKSVF
SILKVTRALLQKSVF

SEQ ID NO: 269876 - protein, 15 aa, Artificial Sequence
  Description of Artificial Sequence: Synthetic peptide
  Seed: SIGKVCRTLLAKSVF
SILKVTRALLRKSVF

SEQ ID NO: 269877 - protein, 15 aa, Artificial Sequence
  Description of Artificial Sequence: Synthetic peptide
  Seed: SIGKVCRTLLAKSVF
SILKVTRALLSKSVF

SEQ ID NO: 269878 - protein, 15 aa, Artificial Sequence
  Description of Artificial Sequence: Synthetic peptide
  Seed: SIGKVCRTLLAKSVF
SILKVTRALLYKSVF

SEQ ID NO: 269879 - protein, 15 aa, Artificial Sequence
  Description of Artificial Sequence: Synthetic peptide
  Seed: SIGKVCRTLLAKSVF
SILKVTRGLLGKSVF

SEQ ID NO: 269880 - protein, 15 aa, Artificial Sequence
  Description of Artificial Sequence: Synthetic peptide
  Seed: SIGKVCRTLLAKSVF
SILKVTRGLLQKSVF

SEQ ID NO: 269881 - protein, 15 aa, Artificial Sequence
  Description of Artificial Sequence: Synthetic peptide
  Seed: SIGKVCRTLLAKSVF
SILKVTRHLLAKSVF

SEQ ID NO: 269882 - protein, 15 aa, Artificial Sequence
  Description of Artificial Sequence: Synthetic peptide
  Seed: SIGKVCRTLLAKSVF
SILKVTRHLLGKSVF

SEQ ID NO: 269883 - protein, 15 aa, Artificial Sequence
  Description of Artificial Sequence: Synthetic peptide
  Seed: SIGKVCRTLLAKSVF
SILKVTRHLLHKSVF

SEQ ID NO: 269884 - protein, 15 aa, Artificial Sequence
  Description of Artificial Sequence: Synthetic peptide
  Seed: SIGKVCRTLLAKSVF
SILKVTRHLLNKSVF

SEQ ID NO: 269885 - protein, 15 aa, Artificial Sequence
  Description of Artificial Sequence: Synthetic peptide
  Seed: SIGKVCRTLLAKSVF
SILKVTRHLLQKSVF

SEQ ID NO: 269886 - protein, 15 aa, Artificial Sequence
  Description of Artificial Sequence: Synthetic peptide
  Seed: SIGKVCRTLLAKSVF
SILKVTRHLLSKSVF

SEQ ID NO: 269887 - protein, 15 aa, Artificial Sequence
  Description of Artificial Sequence: Synthetic peptide
  Seed: SIGKVCRTLLAKSVF
SILKVTRHLLYKSVF

SEQ ID NO: 269888 - protein, 15 aa, Artificial Sequence
  Description of Artificial Sequence: Synthetic peptide
  Seed: SIGKVCRTLLAKSVF
SILKVTRILLSKSVF

SEQ ID NO: 269889 - protein, 15 aa, Artificial Sequence
  Description of Artificial Sequence: Synthetic peptide
  Seed: SIGKVCRTLLAKSVF
SILKVTRKLLAKSVF

SEQ ID NO: 269890 - protein, 15 aa, Artificial Sequence
  Description of Artificial Sequence: Synthetic peptide
  Seed: SIGKVCRTLLAKSVF
SILKVTRKLLCKSVF

SEQ ID NO: 269891 - protein, 15 aa, Artificial Sequence
  Description of Artificial Sequence: Synthetic peptide
  Seed: SIGKVCRTLLAKSVF
SILKVTRKLLDKSVF

SEQ ID NO: 269892 - protein, 15 aa, Artificial Sequence
  Description of Artificial Sequence: Synthetic peptide
  Seed: SIGKVCRTLLAKSVF
SILKVTRKLLEKSVF

SEQ ID NO: 269893 - protein, 15 aa, Artificial Sequence
  Description of Artificial Sequence: Synthetic peptide
  Seed: SIGKVCRTLLAKSVF
SILKVTRKLLFKSVF

SEQ ID NO: 269894 - protein, 15 aa, Artificial Sequence
  Description of Artificial Sequence: Synthetic peptide
  Seed: SIGKVCRTLLAKSVF
SILKVTRKLLGKSVF

SEQ ID NO: 269895 - protein, 15 aa, Artificial Sequence
  Description of Artificial Sequence: Synthetic peptide
  Seed: SIGKVCRTLLAKSVF
SILKVTRKLLHKSVF

SEQ ID NO: 269896 - protein, 15 aa, Artificial Sequence
  Description of Artificial Sequence: Synthetic peptide
  Seed: SIGKVCRTLLAKSVF
SILKVTRKLLIKSVF

SEQ ID NO: 269897 - protein, 15 aa, Artificial Sequence
  Description of Artificial Sequence: Synthetic peptide
  Seed: SIGKVCRTLLAKSVF
SILKVTRKLLKKSVF

SEQ ID NO: 269898 - protein, 15 aa, Artificial Sequence
  Description of Artificial Sequence: Synthetic peptide
  Seed: SIGKVCRTLLAKSVF
SILKVTRKLLLKSVF

SEQ ID NO: 269899 - protein, 15 aa, Artificial Sequence
  Description of Artificial Sequence: Synthetic peptide
  Seed: SIGKVCRTLLAKSVF
SILKVTRKLLMKSVF

SEQ ID NO: 269900 - protein, 15 aa, Artificial Sequence
  Description of Artificial Sequence: Synthetic peptide
  Seed: SIGKVCRTLLAKSVF
SILKVTRKLLNKSVF

SEQ ID NO: 269901 - protein, 15 aa, Artificial Sequence
  Description of Artificial Sequence: Synthetic peptide
  Seed: SIGKVCRTLLAKSVF
SILKVTRKLLPKSVF

SEQ ID NO: 269902 - protein, 15 aa, Artificial Sequence
  Description of Artificial Sequence: Synthetic peptide
  Seed: SIGKVCRTLLAKSVF
SILKVTRKLLQKSVF

SEQ ID NO: 269903 - protein, 15 aa, Artificial Sequence
  Description of Artificial Sequence: Synthetic peptide
  Seed: SIGKVCRTLLAKSVF
SILKVTRKLLRKSVF

SEQ ID NO: 269904 - protein, 15 aa, Artificial Sequence
  Description of Artificial Sequence: Synthetic peptide
  Seed: SIGKVCRTLLAKSVF
SILKVTRKLLSKSVF

SEQ ID NO: 269905 - protein, 15 aa, Artificial Sequence
  Description of Artificial Sequence: Synthetic peptide
  Seed: SIGKVCRTLLAKSVF
SILKVTRKLLTKSVF

SEQ ID NO: 269906 - protein, 15 aa, Artificial Sequence
  Description of Artificial Sequence: Synthetic peptide
  Seed: SIGKVCRTLLAKSVF
SILKVTRKLLVKSVF

SEQ ID NO: 269907 - protein, 15 aa, Artificial Sequence
  Description of Artificial Sequence: Synthetic peptide
  Seed: SIGKVCRTLLAKSVF
SILKVTRKLLWKSVF

SEQ ID NO: 269908 - protein, 15 aa, Artificial Sequence
  Description of Artificial Sequence: Synthetic peptide
  Seed: SIGKVCRTLLAKSVF
SILKVTRKLLYKSVF

SEQ ID NO: 269909 - protein, 15 aa, Artificial Sequence
  Description of Artificial Sequence: Synthetic peptide
  Seed: SIGKVCRTLLAKSVF
SILKVTRNLLAKSVF

SEQ ID NO: 269910 - protein, 15 aa, Artificial Sequence
  Description of Artificial Sequence: Synthetic peptide
  Seed: SIGKVCRTLLAKSVF
SILKVTRNLLGKSVF

SEQ ID NO: 269911 - protein, 15 aa, Artificial Sequence
  Description of Artificial Sequence: Synthetic peptide
  Seed: SIGKVCRTLLAKSVF
SILKVTRNLLQKSVF

SEQ ID NO: 269912 - protein, 15 aa, Artificial Sequence
  Description of Artificial Sequence: Synthetic peptide
  Seed: SIGKVCRTLLAKSVF
SILKVTRNLLSKSVF

SEQ ID NO: 269913 - protein, 15 aa, Artificial Sequence
  Description of Artificial Sequence: Synthetic peptide
  Seed: SIGKVCRTLLAKSVF
SILKVTRNLLYKSVF

SEQ ID NO: 269914 - protein, 15 aa, Artificial Sequence
  Description of Artificial Sequence: Synthetic peptide
  Seed: SIGKVCRTLLAKSVF
SILKVTRPLLAKSVF

SEQ ID NO: 269915 - protein, 15 aa, Artificial Sequence
  Description of Artificial Sequence: Synthetic peptide
  Seed: SIGKVCRTLLAKSVF
SILKVTRPLLGKSVF

SEQ ID NO: 269916 - protein, 15 aa, Artificial Sequence
  Description of Artificial Sequence: Synthetic peptide
  Seed: SIGKVCRTLLAKSVF
SILKVTRPLLQKSVF

SEQ ID NO: 269917 - protein, 15 aa, Artificial Sequence
  Description of Artificial Sequence: Synthetic peptide
  Seed: SIGKVCRTLLAKSVF
SILKVTRPLLSKSVF

SEQ ID NO: 269918 - protein, 15 aa, Artificial Sequence
  Description of Artificial Sequence: Synthetic peptide
  Seed: SIGKVCRTLLAKSVF
SILKVTRQLLAKSVF

SEQ ID NO: 269919 - protein, 15 aa, Artificial Sequence
  Description of Artificial Sequence: Synthetic peptide
  Seed: SIGKVCRTLLAKSVF
SILKVTRQLLGKSVF

SEQ ID NO: 269920 - protein, 15 aa, Artificial Sequence
  Description of Artificial Sequence: Synthetic peptide
  Seed: SIGKVCRTLLAKSVF
SILKVTRQLLQKSVF

SEQ ID NO: 269921 - protein, 15 aa, Artificial Sequence
  Description of Artificial Sequence: Synthetic peptide
  Seed: SIGKVCRTLLAKSVF
SILKVTRQLLSKSVF

SEQ ID NO: 269922 - protein, 15 aa, Artificial Sequence
  Description of Artificial Sequence: Synthetic peptide
  Seed: SIGKVCRTLLAKSVF
SILKVTRRLLAKSVF

SEQ ID NO: 269923 - protein, 15 aa, Artificial Sequence
  Description of Artificial Sequence: Synthetic peptide
  Seed: SIGKVCRTLLAKSVF
SILKVTRRLLCKSVF

SEQ ID NO: 269924 - protein, 15 aa, Artificial Sequence
  Description of Artificial Sequence: Synthetic peptide
  Seed: SIGKVCRTLLAKSVF
SILKVTRRLLDKSVF

SEQ ID NO: 269925 - protein, 15 aa, Artificial Sequence
  Description of Artificial Sequence: Synthetic peptide
  Seed: SIGKVCRTLLAKSVF
SILKVTRRLLEKSVF

SEQ ID NO: 269926 - protein, 15 aa, Artificial Sequence
  Description of Artificial Sequence: Synthetic peptide
  Seed: SIGKVCRTLLAKSVF
SILKVTRRLLFKSVF

SEQ ID NO: 269927 - protein, 15 aa, Artificial Sequence
  Description of Artificial Sequence: Synthetic peptide
  Seed: SIGKVCRTLLAKSVF
SILKVTRRLLGKSVF

SEQ ID NO: 269928 - protein, 15 aa, Artificial Sequence
  Description of Artificial Sequence: Synthetic peptide
  Seed: SIGKVCRTLLAKSVF
SILKVTRRLLHKSVF

SEQ ID NO: 269929 - protein, 15 aa, Artificial Sequence
  Description of Artificial Sequence: Synthetic peptide
  Seed: SIGKVCRTLLAKSVF
SILKVTRRLLIKSVF

SEQ ID NO: 269930 - protein, 15 aa, Artificial Sequence
  Description of Artificial Sequence: Synthetic peptide
  Seed: SIGKVCRTLLAKSVF
SILKVTRRLLKKSVF

SEQ ID NO: 269931 - protein, 15 aa, Artificial Sequence
  Description of Artificial Sequence: Synthetic peptide
  Seed: SIGKVCRTLLAKSVF
SILKVTRRLLLKSVF

SEQ ID NO: 269932 - protein, 15 aa, Artificial Sequence
  Description of Artificial Sequence: Synthetic peptide
  Seed: SIGKVCRTLLAKSVF
SILKVTRRLLMKSVF

SEQ ID NO: 269933 - protein, 15 aa, Artificial Sequence
  Description of Artificial Sequence: Synthetic peptide
  Seed: SIGKVCRTLLAKSVF
SILKVTRRLLNKSVF

SEQ ID NO: 269934 - protein, 15 aa, Artificial Sequence
  Description of Artificial Sequence: Synthetic peptide
  Seed: SIGKVCRTLLAKSVF
SILKVTRRLLPKSVF

SEQ ID NO: 269935 - protein, 15 aa, Artificial Sequence
  Description of Artificial Sequence: Synthetic peptide
  Seed: SIGKVCRTLLAKSVF
SILKVTRRLLQKSVF

SEQ ID NO: 269936 - protein, 15 aa, Artificial Sequence
  Description of Artificial Sequence: Synthetic peptide
  Seed: SIGKVCRTLLAKSVF
SILKVTRRLLRKSVF

SEQ ID NO: 269937 - protein, 15 aa, Artificial Sequence
  Description of Artificial Sequence: Synthetic peptide
  Seed: SIGKVCRTLLAKSVF
SILKVTRRLLSKSVF

SEQ ID NO: 269938 - protein, 15 aa, Artificial Sequence
  Description of Artificial Sequence: Synthetic peptide
  Seed: SIGKVCRTLLAKSVF
SILKVTRRLLTKSVF

SEQ ID NO: 269939 - protein, 15 aa, Artificial Sequence
  Description of Artificial Sequence: Synthetic peptide
  Seed: SIGKVCRTLLAKSVF
SILKVTRRLLVKSVF

SEQ ID NO: 269940 - protein, 15 aa, Artificial Sequence
  Description of Artificial Sequence: Synthetic peptide
  Seed: SIGKVCRTLLAKSVF
SILKVTRRLLYKSVF

SEQ ID NO: 269941 - protein, 15 aa, Artificial Sequence
  Description of Artificial Sequence: Synthetic peptide
  Seed: SIGKVCRTLLAKSVF
SILKVTRSLLAKSVF

SEQ ID NO: 269942 - protein, 15 aa, Artificial Sequence
  Description of Artificial Sequence: Synthetic peptide
  Seed: SIGKVCRTLLAKSVF
SILKVTRSLLGKSVF

SEQ ID NO: 269943 - protein, 15 aa, Artificial Sequence
  Description of Artificial Sequence: Synthetic peptide
  Seed: SIGKVCRTLLAKSVF
SILKVTRSLLHKSVF

SEQ ID NO: 269944 - protein, 15 aa, Artificial Sequence
  Description of Artificial Sequence: Synthetic peptide
  Seed: SIGKVCRTLLAKSVF
SILKVTRSLLQKSVF

SEQ ID NO: 269945 - protein, 15 aa, Artificial Sequence
  Description of Artificial Sequence: Synthetic peptide
  Seed: SIGKVCRTLLAKSVF
SILKVTRSLLRKSVF

SEQ ID NO: 269946 - protein, 15 aa, Artificial Sequence
  Description of Artificial Sequence: Synthetic peptide
  Seed: SIGKVCRTLLAKSVF
SILKVTRSLLSKSVF

SEQ ID NO: 269947 - protein, 15 aa, Artificial Sequence
  Description of Artificial Sequence: Synthetic peptide
  Seed: SIGKVCRTLLAKSVF
SILKVTRSLLTKSVF

SEQ ID NO: 269948 - protein, 15 aa, Artificial Sequence
  Description of Artificial Sequence: Synthetic peptide
  Seed: SIGKVCRTLLAKSVF
SILKVTRSLLVKSVF

SEQ ID NO: 269949 - protein, 15 aa, Artificial Sequence
  Description of Artificial Sequence: Synthetic peptide
  Seed: SIGKVCRTLLAKSVF
SILKVTRSLLYKSVF

SEQ ID NO: 269950 - protein, 15 aa, Artificial Sequence
  Description of Artificial Sequence: Synthetic peptide
  Seed: SIGKVCRTLLAKSVF
SILKVTRTLLAKSVF

SEQ ID NO: 269951 - protein, 15 aa, Artificial Sequence
  Description of Artificial Sequence: Synthetic peptide
  Seed: SIGKVCRTLLAKSVF
SILKVTRTLLGKSVF

SEQ ID NO: 269952 - protein, 15 aa, Artificial Sequence
  Description of Artificial Sequence: Synthetic peptide
  Seed: SIGKVCRTLLAKSVF
SILKVTRTLLHKSVF

SEQ ID NO: 269953 - protein, 15 aa, Artificial Sequence
  Description of Artificial Sequence: Synthetic peptide
  Seed: SIGKVCRTLLAKSVF
SILKVTRTLLKKSVF

SEQ ID NO: 269954 - protein, 15 aa, Artificial Sequence
  Description of Artificial Sequence: Synthetic peptide
  Seed: SIGKVCRTLLAKSVF
SILKVTRTLLNKSVF

SEQ ID NO: 269955 - protein, 15 aa, Artificial Sequence
  Description of Artificial Sequence: Synthetic peptide
  Seed: SIGKVCRTLLAKSVF
SILKVTRTLLQKSVF

SEQ ID NO: 269956 - protein, 15 aa, Artificial Sequence
  Description of Artificial Sequence: Synthetic peptide
  Seed: SIGKVCRTLLAKSVF
SILKVTRTLLRKSVF

SEQ ID NO: 269957 - protein, 15 aa, Artificial Sequence
  Description of Artificial Sequence: Synthetic peptide
  Seed: SIGKVCRTLLAKSVF
SILKVTRTLLSKSVF

SEQ ID NO: 269958 - protein, 15 aa, Artificial Sequence
  Description of Artificial Sequence: Synthetic peptide
  Seed: SIGKVCRTLLAKSVF
SILKVTRTLLTKSVF

SEQ ID NO: 269959 - protein, 15 aa, Artificial Sequence
  Description of Artificial Sequence: Synthetic peptide
  Seed: SIGKVCRTLLAKSVF
SILKVTRTLLYKSVF

SEQ ID NO: 269960 - protein, 15 aa, Artificial Sequence
  Description of Artificial Sequence: Synthetic peptide
  Seed: SIGKVCRTLLAKSVF
SILKVTRVLLHKSVF

SEQ ID NO: 269961 - protein, 15 aa, Artificial Sequence
  Description of Artificial Sequence: Synthetic peptide
  Seed: SIGKVCRTLLAKSVF
SILKVTRVLLRKSVF

SEQ ID NO: 269962 - protein, 15 aa, Artificial Sequence
  Description of Artificial Sequence: Synthetic peptide
  Seed: SIGKVCRTLLAKSVF
SILKVTRVLLSKSVF

SEQ ID NO: 269963 - protein, 15 aa, Artificial Sequence
  Description of Artificial Sequence: Synthetic peptide
  Seed: SIGKVCRTLLAKSVF
SILKVVRALLAKSVF

SEQ ID NO: 269964 - protein, 15 aa, Artificial Sequence
  Description of Artificial Sequence: Synthetic peptide
  Seed: SIGKVCRTLLAKSVF
SILKVVRALLGKSVF

SEQ ID NO: 269965 - protein, 15 aa, Artificial Sequence
  Description of Artificial Sequence: Synthetic peptide
  Seed: SIGKVCRTLLAKSVF
SILKVVRALLHKSVF

SEQ ID NO: 269966 - protein, 15 aa, Artificial Sequence
  Description of Artificial Sequence: Synthetic peptide
  Seed: SIGKVCRTLLAKSVF
SILKVVRALLNKSVF

SEQ ID NO: 269967 - protein, 15 aa, Artificial Sequence
  Description of Artificial Sequence: Synthetic peptide
  Seed: SIGKVCRTLLAKSVF
SILKVVRALLQKSVF

SEQ ID NO: 269968 - protein, 15 aa, Artificial Sequence
  Description of Artificial Sequence: Synthetic peptide
  Seed: SIGKVCRTLLAKSVF
SILKVVRALLRKSVF

SEQ ID NO: 269969 - protein, 15 aa, Artificial Sequence
  Description of Artificial Sequence: Synthetic peptide
  Seed: SIGKVCRTLLAKSVF
SILKVVRALLSKSVF

SEQ ID NO: 269970 - protein, 15 aa, Artificial Sequence
  Description of Artificial Sequence: Synthetic peptide
  Seed: SIGKVCRTLLAKSVF
SILKVVRALLTKSVF

SEQ ID NO: 269971 - protein, 15 aa, Artificial Sequence
  Description of Artificial Sequence: Synthetic peptide
  Seed: SIGKVCRTLLAKSVF
SILKVVRALLYKSVF

SEQ ID NO: 269972 - protein, 15 aa, Artificial Sequence
  Description of Artificial Sequence: Synthetic peptide
  Seed: SIGKVCRTLLAKSVF
SILKVVRGLLAKSVF

SEQ ID NO: 269973 - protein, 15 aa, Artificial Sequence
  Description of Artificial Sequence: Synthetic peptide
  Seed: SIGKVCRTLLAKSVF
SILKVVRGLLGKSVF

SEQ ID NO: 269974 - protein, 15 aa, Artificial Sequence
  Description of Artificial Sequence: Synthetic peptide
  Seed: SIGKVCRTLLAKSVF
SILKVVRGLLHKSVF

SEQ ID NO: 269975 - protein, 15 aa, Artificial Sequence
  Description of Artificial Sequence: Synthetic peptide
  Seed: SIGKVCRTLLAKSVF
SILKVVRGLLQKSVF

SEQ ID NO: 269976 - protein, 15 aa, Artificial Sequence
  Description of Artificial Sequence: Synthetic peptide
  Seed: SIGKVCRTLLAKSVF
SILKVVRGLLSKSVF

SEQ ID NO: 269977 - protein, 15 aa, Artificial Sequence
  Description of Artificial Sequence: Synthetic peptide
  Seed: SIGKVCRTLLAKSVF
SILKVVRHLLAKSVF

SEQ ID NO: 269978 - protein, 15 aa, Artificial Sequence
  Description of Artificial Sequence: Synthetic peptide
  Seed: SIGKVCRTLLAKSVF
SILKVVRHLLEKSVF

SEQ ID NO: 269979 - protein, 15 aa, Artificial Sequence
  Description of Artificial Sequence: Synthetic peptide
  Seed: SIGKVCRTLLAKSVF
SILKVVRHLLGKSVF

SEQ ID NO: 269980 - protein, 15 aa, Artificial Sequence
  Description of Artificial Sequence: Synthetic peptide
  Seed: SIGKVCRTLLAKSVF
SILKVVRHLLHKSVF

SEQ ID NO: 269981 - protein, 15 aa, Artificial Sequence
  Description of Artificial Sequence: Synthetic peptide
  Seed: SIGKVCRTLLAKSVF
SILKVVRHLLIKSVF

SEQ ID NO: 269982 - protein, 15 aa, Artificial Sequence
  Description of Artificial Sequence: Synthetic peptide
  Seed: SIGKVCRTLLAKSVF
SILKVVRHLLKKSVF

SEQ ID NO: 269983 - protein, 15 aa, Artificial Sequence
  Description of Artificial Sequence: Synthetic peptide
  Seed: SIGKVCRTLLAKSVF
SILKVVRHLLMKSVF

SEQ ID NO: 269984 - protein, 15 aa, Artificial Sequence
  Description of Artificial Sequence: Synthetic peptide
  Seed: SIGKVCRTLLAKSVF
SILKVVRHLLNKSVF

SEQ ID NO: 269985 - protein, 15 aa, Artificial Sequence
  Description of Artificial Sequence: Synthetic peptide
  Seed: SIGKVCRTLLAKSVF
SILKVVRHLLPKSVF

SEQ ID NO: 269986 - protein, 15 aa, Artificial Sequence
  Description of Artificial Sequence: Synthetic peptide
  Seed: SIGKVCRTLLAKSVF
SILKVVRHLLQKSVF

SEQ ID NO: 269987 - protein, 15 aa, Artificial Sequence
  Description of Artificial Sequence: Synthetic peptide
  Seed: SIGKVCRTLLAKSVF
SILKVVRHLLRKSVF

SEQ ID NO: 269988 - protein, 15 aa, Artificial Sequence
  Description of Artificial Sequence: Synthetic peptide
  Seed: SIGKVCRTLLAKSVF
SILKVVRHLLSKSVF

SEQ ID NO: 269989 - protein, 15 aa, Artificial Sequence
  Description of Artificial Sequence: Synthetic peptide
  Seed: SIGKVCRTLLAKSVF
SILKVVRHLLTKSVF

SEQ ID NO: 269990 - protein, 15 aa, Artificial Sequence
  Description of Artificial Sequence: Synthetic peptide
  Seed: SIGKVCRTLLAKSVF
SILKVVRHLLVKSVF

SEQ ID NO: 269991 - protein, 15 aa, Artificial Sequence
  Description of Artificial Sequence: Synthetic peptide
  Seed: SIGKVCRTLLAKSVF
SILKVVRHLLYKSVF

SEQ ID NO: 269992 - protein, 15 aa, Artificial Sequence
  Description of Artificial Sequence: Synthetic peptide
  Seed: SIGKVCRTLLAKSVF
SILKVVRKLLAKSVF

SEQ ID NO: 269993 - protein, 15 aa, Artificial Sequence
  Description of Artificial Sequence: Synthetic peptide
  Seed: SIGKVCRTLLAKSVF
SILKVVRKLLCKSVF

SEQ ID NO: 269994 - protein, 15 aa, Artificial Sequence
  Description of Artificial Sequence: Synthetic peptide
  Seed: SIGKVCRTLLAKSVF
SILKVVRKLLDKSVF

SEQ ID NO: 269995 - protein, 15 aa, Artificial Sequence
  Description of Artificial Sequence: Synthetic peptide
  Seed: SIGKVCRTLLAKSVF
SILKVVRKLLEKSVF

SEQ ID NO: 269996 - protein, 15 aa, Artificial Sequence
  Description of Artificial Sequence: Synthetic peptide
  Seed: SIGKVCRTLLAKSVF
SILKVVRKLLFKSVF

SEQ ID NO: 269997 - protein, 15 aa, Artificial Sequence
  Description of Artificial Sequence: Synthetic peptide
  Seed: SIGKVCRTLLAKSVF
SILKVVRKLLGKSVF

SEQ ID NO: 269998 - protein, 15 aa, Artificial Sequence
  Description of Artificial Sequence: Synthetic peptide
  Seed: SIGKVCRTLLAKSVF
SILKVVRKLLHKSVF

SEQ ID NO: 269999 - protein, 15 aa, Artificial Sequence
  Description of Artificial Sequence: Synthetic peptide
  Seed: SIGKVCRTLLAKSVF
SILKVVRKLLIKSVF

SEQ ID NO: 270000 - protein, 15 aa, Artificial Sequence
  Description of Artificial Sequence: Synthetic peptide
  Seed: SIGKVCRTLLAKSVF
SILKVVRKLLKKSVF

SEQ ID NO: 270001 - protein, 15 aa, Artificial Sequence
  Description of Artificial Sequence: Synthetic peptide
  Seed: SIGKVCRTLLAKSVF
SILKVVRKLLLKSVF

SEQ ID NO: 270002 - protein, 15 aa, Artificial Sequence
  Description of Artificial Sequence: Synthetic peptide
  Seed: SIGKVCRTLLAKSVF
SILKVVRKLLMKSVF

SEQ ID NO: 270003 - protein, 15 aa, Artificial Sequence
  Description of Artificial Sequence: Synthetic peptide
  Seed: SIGKVCRTLLAKSVF
SILKVVRKLLNKSVF

SEQ ID NO: 270004 - protein, 15 aa, Artificial Sequence
  Description of Artificial Sequence: Synthetic peptide
  Seed: SIGKVCRTLLAKSVF
SILKVVRKLLPKSVF

SEQ ID NO: 270005 - protein, 15 aa, Artificial Sequence
  Description of Artificial Sequence: Synthetic peptide
  Seed: SIGKVCRTLLAKSVF
SILKVVRKLLQKSVF

SEQ ID NO: 270006 - protein, 15 aa, Artificial Sequence
  Description of Artificial Sequence: Synthetic peptide
  Seed: SIGKVCRTLLAKSVF
SILKVVRKLLRKSVF

SEQ ID NO: 270007 - protein, 15 aa, Artificial Sequence
  Description of Artificial Sequence: Synthetic peptide
  Seed: SIGKVCRTLLAKSVF
SILKVVRKLLSKSVF

SEQ ID NO: 270008 - protein, 15 aa, Artificial Sequence
  Description of Artificial Sequence: Synthetic peptide
  Seed: SIGKVCRTLLAKSVF
SILKVVRKLLTKSVF

SEQ ID NO: 270009 - protein, 15 aa, Artificial Sequence
  Description of Artificial Sequence: Synthetic peptide
  Seed: SIGKVCRTLLAKSVF
SILKVVRKLLVKSVF

SEQ ID NO: 270010 - protein, 15 aa, Artificial Sequence
  Description of Artificial Sequence: Synthetic peptide
  Seed: SIGKVCRTLLAKSVF
SILKVVRKLLWKSVF

SEQ ID NO: 270011 - protein, 15 aa, Artificial Sequence
  Description of Artificial Sequence: Synthetic peptide
  Seed: SIGKVCRTLLAKSVF
SILKVVRKLLYKSVF

SEQ ID NO: 270012 - protein, 15 aa, Artificial Sequence
  Description of Artificial Sequence: Synthetic peptide
  Seed: SIGKVCRTLLAKSVF
SILKVVRNLLAKSVF

SEQ ID NO: 270013 - protein, 15 aa, Artificial Sequence
  Description of Artificial Sequence: Synthetic peptide
  Seed: SIGKVCRTLLAKSVF
SILKVVRNLLDKSVF

SEQ ID NO: 270014 - protein, 15 aa, Artificial Sequence
  Description of Artificial Sequence: Synthetic peptide
  Seed: SIGKVCRTLLAKSVF
SILKVVRNLLEKSVF

SEQ ID NO: 270015 - protein, 15 aa, Artificial Sequence
  Description of Artificial Sequence: Synthetic peptide
  Seed: SIGKVCRTLLAKSVF
SILKVVRNLLGKSVF

SEQ ID NO: 270016 - protein, 15 aa, Artificial Sequence
  Description of Artificial Sequence: Synthetic peptide
  Seed: SIGKVCRTLLAKSVF
SILKVVRNLLHKSVF

SEQ ID NO: 270017 - protein, 15 aa, Artificial Sequence
  Description of Artificial Sequence: Synthetic peptide
  Seed: SIGKVCRTLLAKSVF
SILKVVRNLLNKSVF

SEQ ID NO: 270018 - protein, 15 aa, Artificial Sequence
  Description of Artificial Sequence: Synthetic peptide
  Seed: SIGKVCRTLLAKSVF
SILKVVRNLLQKSVF

SEQ ID NO: 270019 - protein, 15 aa, Artificial Sequence
  Description of Artificial Sequence: Synthetic peptide
  Seed: SIGKVCRTLLAKSVF
SILKVVRNLLRKSVF

SEQ ID NO: 270020 - protein, 15 aa, Artificial Sequence
  Description of Artificial Sequence: Synthetic peptide
  Seed: SIGKVCRTLLAKSVF
SILKVVRNLLSKSVF

SEQ ID NO: 270021 - protein, 15 aa, Artificial Sequence
  Description of Artificial Sequence: Synthetic peptide
  Seed: SIGKVCRTLLAKSVF
SILKVVRNLLTKSVF

SEQ ID NO: 270022 - protein, 15 aa, Artificial Sequence
  Description of Artificial Sequence: Synthetic peptide
  Seed: SIGKVCRTLLAKSVF
SILKVVRNLLYKSVF

SEQ ID NO: 270023 - protein, 15 aa, Artificial Sequence
  Description of Artificial Sequence: Synthetic peptide
  Seed: SIGKVCRTLLAKSVF
SILKVVRPLLAKSVF

SEQ ID NO: 270024 - protein, 15 aa, Artificial Sequence
  Description of Artificial Sequence: Synthetic peptide
  Seed: SIGKVCRTLLAKSVF
SILKVVRPLLGKSVF

SEQ ID NO: 270025 - protein, 15 aa, Artificial Sequence
  Description of Artificial Sequence: Synthetic peptide
  Seed: SIGKVCRTLLAKSVF
SILKVVRPLLHKSVF

SEQ ID NO: 270026 - protein, 15 aa, Artificial Sequence
  Description of Artificial Sequence: Synthetic peptide
  Seed: SIGKVCRTLLAKSVF
SILKVVRPLLMKSVF

SEQ ID NO: 270027 - protein, 15 aa, Artificial Sequence
  Description of Artificial Sequence: Synthetic peptide
  Seed: SIGKVCRTLLAKSVF
SILKVVRPLLNKSVF

SEQ ID NO: 270028 - protein, 15 aa, Artificial Sequence
  Description of Artificial Sequence: Synthetic peptide
  Seed: SIGKVCRTLLAKSVF
SILKVVRPLLQKSVF

SEQ ID NO: 270029 - protein, 15 aa, Artificial Sequence
  Description of Artificial Sequence: Synthetic peptide
  Seed: SIGKVCRTLLAKSVF
SILKVVRPLLSKSVF

SEQ ID NO: 270030 - protein, 15 aa, Artificial Sequence
  Description of Artificial Sequence: Synthetic peptide
  Seed: SIGKVCRTLLAKSVF
SILKVVRPLLTKSVF

SEQ ID NO: 270031 - protein, 15 aa, Artificial Sequence
  Description of Artificial Sequence: Synthetic peptide
  Seed: SIGKVCRTLLAKSVF
SILKVVRPLLVKSVF

SEQ ID NO: 270032 - protein, 15 aa, Artificial Sequence
  Description of Artificial Sequence: Synthetic peptide
  Seed: SIGKVCRTLLAKSVF
SILKVVRPLLYKSVF

SEQ ID NO: 270033 - protein, 15 aa, Artificial Sequence
  Description of Artificial Sequence: Synthetic peptide
  Seed: SIGKVCRTLLAKSVF
SILKVVRQLLAKSVF

SEQ ID NO: 270034 - protein, 15 aa, Artificial Sequence
  Description of Artificial Sequence: Synthetic peptide
  Seed: SIGKVCRTLLAKSVF
SILKVVRQLLGKSVF

SEQ ID NO: 270035 - protein, 15 aa, Artificial Sequence
  Description of Artificial Sequence: Synthetic peptide
  Seed: SIGKVCRTLLAKSVF
SILKVVRQLLHKSVF

SEQ ID NO: 270036 - protein, 15 aa, Artificial Sequence
  Description of Artificial Sequence: Synthetic peptide
  Seed: SIGKVCRTLLAKSVF
SILKVVRQLLQKSVF

SEQ ID NO: 270037 - protein, 15 aa, Artificial Sequence
  Description of Artificial Sequence: Synthetic peptide
  Seed: SIGKVCRTLLAKSVF
SILKVVRQLLSKSVF

SEQ ID NO: 270038 - protein, 15 aa, Artificial Sequence
  Description of Artificial Sequence: Synthetic peptide
  Seed: SIGKVCRTLLAKSVF
SILKVVRRLLAKSVF

SEQ ID NO: 270039 - protein, 15 aa, Artificial Sequence
  Description of Artificial Sequence: Synthetic peptide
  Seed: SIGKVCRTLLAKSVF
SILKVVRRLLCKSVF

SEQ ID NO: 270040 - protein, 15 aa, Artificial Sequence
  Description of Artificial Sequence: Synthetic peptide
  Seed: SIGKVCRTLLAKSVF
SILKVVRRLLDKSVF

SEQ ID NO: 270041 - protein, 15 aa, Artificial Sequence
  Description of Artificial Sequence: Synthetic peptide
  Seed: SIGKVCRTLLAKSVF
SILKVVRRLLEKSVF

SEQ ID NO: 270042 - protein, 15 aa, Artificial Sequence
  Description of Artificial Sequence: Synthetic peptide
  Seed: SIGKVCRTLLAKSVF
SILKVVRRLLFKSVF

SEQ ID NO: 270043 - protein, 15 aa, Artificial Sequence
  Description of Artificial Sequence: Synthetic peptide
  Seed: SIGKVCRTLLAKSVF
SILKVVRRLLGKSVF

SEQ ID NO: 270044 - protein, 15 aa, Artificial Sequence
  Description of Artificial Sequence: Synthetic peptide
  Seed: SIGKVCRTLLAKSVF
SILKVVRRLLHKSVF

SEQ ID NO: 270045 - protein, 15 aa, Artificial Sequence
  Description of Artificial Sequence: Synthetic peptide
  Seed: SIGKVCRTLLAKSVF
SILKVVRRLLIKSVF

SEQ ID NO: 270046 - protein, 15 aa, Artificial Sequence
  Description of Artificial Sequence: Synthetic peptide
  Seed: SIGKVCRTLLAKSVF
SILKVVRRLLKKSVF

SEQ ID NO: 270047 - protein, 15 aa, Artificial Sequence
  Description of Artificial Sequence: Synthetic peptide
  Seed: SIGKVCRTLLAKSVF
SILKVVRRLLLKSVF

SEQ ID NO: 270048 - protein, 15 aa, Artificial Sequence
  Description of Artificial Sequence: Synthetic peptide
  Seed: SIGKVCRTLLAKSVF
SILKVVRRLLMKSVF

SEQ ID NO: 270049 - protein, 15 aa, Artificial Sequence
  Description of Artificial Sequence: Synthetic peptide
  Seed: SIGKVCRTLLAKSVF
SILKVVRRLLNKSVF

SEQ ID NO: 270050 - protein, 15 aa, Artificial Sequence
  Description of Artificial Sequence: Synthetic peptide
  Seed: SIGKVCRTLLAKSVF
SILKVVRRLLPKSVF

SEQ ID NO: 270051 - protein, 15 aa, Artificial Sequence
  Description of Artificial Sequence: Synthetic peptide
  Seed: SIGKVCRTLLAKSVF
SILKVVRRLLQKSVF

SEQ ID NO: 270052 - protein, 15 aa, Artificial Sequence
  Description of Artificial Sequence: Synthetic peptide
  Seed: SIGKVCRTLLAKSVF
SILKVVRRLLRKSVF

SEQ ID NO: 270053 - protein, 15 aa, Artificial Sequence
  Description of Artificial Sequence: Synthetic peptide
  Seed: SIGKVCRTLLAKSVF
SILKVVRRLLSKSVF

SEQ ID NO: 270054 - protein, 15 aa, Artificial Sequence
  Description of Artificial Sequence: Synthetic peptide
  Seed: SIGKVCRTLLAKSVF
SILKVVRRLLTKSVF

SEQ ID NO: 270055 - protein, 15 aa, Artificial Sequence
  Description of Artificial Sequence: Synthetic peptide
  Seed: SIGKVCRTLLAKSVF
SILKVVRRLLVKSVF

SEQ ID NO: 270056 - protein, 15 aa, Artificial Sequence
  Description of Artificial Sequence: Synthetic peptide
  Seed: SIGKVCRTLLAKSVF
SILKVVRRLLWKSVF

SEQ ID NO: 270057 - protein, 15 aa, Artificial Sequence
  Description of Artificial Sequence: Synthetic peptide
  Seed: SIGKVCRTLLAKSVF
SILKVVRRLLYKSVF

SEQ ID NO: 270058 - protein, 15 aa, Artificial Sequence
  Description of Artificial Sequence: Synthetic peptide
  Seed: SIGKVCRTLLAKSVF
SILKVVRSLLAKSVF

SEQ ID NO: 270059 - protein, 15 aa, Artificial Sequence
  Description of Artificial Sequence: Synthetic peptide
  Seed: SIGKVCRTLLAKSVF
SILKVVRSLLDKSVF

SEQ ID NO: 270060 - protein, 15 aa, Artificial Sequence
  Description of Artificial Sequence: Synthetic peptide
  Seed: SIGKVCRTLLAKSVF
SILKVVRSLLEKSVF

SEQ ID NO: 270061 - protein, 15 aa, Artificial Sequence
  Description of Artificial Sequence: Synthetic peptide
  Seed: SIGKVCRTLLAKSVF
SILKVVRSLLGKSVF

SEQ ID NO: 270062 - protein, 15 aa, Artificial Sequence
  Description of Artificial Sequence: Synthetic peptide
  Seed: SIGKVCRTLLAKSVF
SILKVVRSLLHKSVF

SEQ ID NO: 270063 - protein, 15 aa, Artificial Sequence
  Description of Artificial Sequence: Synthetic peptide
  Seed: SIGKVCRTLLAKSVF
SILKVVRSLLNKSVF

SEQ ID NO: 270064 - protein, 15 aa, Artificial Sequence
  Description of Artificial Sequence: Synthetic peptide
  Seed: SIGKVCRTLLAKSVF
SILKVVRSLLPKSVF

SEQ ID NO: 270065 - protein, 15 aa, Artificial Sequence
  Description of Artificial Sequence: Synthetic peptide
  Seed: SIGKVCRTLLAKSVF
SILKVVRSLLQKSVF

SEQ ID NO: 270066 - protein, 15 aa, Artificial Sequence
  Description of Artificial Sequence: Synthetic peptide
  Seed: SIGKVCRTLLAKSVF
SILKVVRSLLRKSVF

SEQ ID NO: 270067 - protein, 15 aa, Artificial Sequence
  Description of Artificial Sequence: Synthetic peptide
  Seed: SIGKVCRTLLAKSVF
SILKVVRSLLSKSVF

SEQ ID NO: 270068 - protein, 15 aa, Artificial Sequence
  Description of Artificial Sequence: Synthetic peptide
  Seed: SIGKVCRTLLAKSVF
SILKVVRSLLTKSVF

SEQ ID NO: 270069 - protein, 15 aa, Artificial Sequence
  Description of Artificial Sequence: Synthetic peptide
  Seed: SIGKVCRTLLAKSVF
SILKVVRSLLYKSVF

SEQ ID NO: 270070 - protein, 15 aa, Artificial Sequence
  Description of Artificial Sequence: Synthetic peptide
  Seed: SIGKVCRTLLAKSVF
SILKVVRTLLAKSVF

SEQ ID NO: 270071 - protein, 15 aa, Artificial Sequence
  Description of Artificial Sequence: Synthetic peptide
  Seed: SIGKVCRTLLAKSVF
SILKVVRTLLDKSVF

SEQ ID NO: 270072 - protein, 15 aa, Artificial Sequence
  Description of Artificial Sequence: Synthetic peptide
  Seed: SIGKVCRTLLAKSVF
SILKVVRTLLEKSVF

SEQ ID NO: 270073 - protein, 15 aa, Artificial Sequence
  Description of Artificial Sequence: Synthetic peptide
  Seed: SIGKVCRTLLAKSVF
SILKVVRTLLGKSVF

SEQ ID NO: 270074 - protein, 15 aa, Artificial Sequence
  Description of Artificial Sequence: Synthetic peptide
  Seed: SIGKVCRTLLAKSVF
SILKVVRTLLHKSVF

SEQ ID NO: 270075 - protein, 15 aa, Artificial Sequence
  Description of Artificial Sequence: Synthetic peptide
  Seed: SIGKVCRTLLAKSVF
SILKVVRTLLKKSVF

SEQ ID NO: 270076 - protein, 15 aa, Artificial Sequence
  Description of Artificial Sequence: Synthetic peptide
  Seed: SIGKVCRTLLAKSVF
SILKVVRTLLNKSVF

SEQ ID NO: 270077 - protein, 15 aa, Artificial Sequence
  Description of Artificial Sequence: Synthetic peptide
  Seed: SIGKVCRTLLAKSVF
SILKVVRTLLPKSVF

SEQ ID NO: 270078 - protein, 15 aa, Artificial Sequence
  Description of Artificial Sequence: Synthetic peptide
  Seed: SIGKVCRTLLAKSVF
SILKVVRTLLQKSVF

SEQ ID NO: 270079 - protein, 15 aa, Artificial Sequence
  Description of Artificial Sequence: Synthetic peptide
  Seed: SIGKVCRTLLAKSVF
SILKVVRTLLRKSVF

SEQ ID NO: 270080 - protein, 15 aa, Artificial Sequence
  Description of Artificial Sequence: Synthetic peptide
  Seed: SIGKVCRTLLAKSVF
SILKVVRTLLSKSVF

SEQ ID NO: 270081 - protein, 15 aa, Artificial Sequence
  Description of Artificial Sequence: Synthetic peptide
  Seed: SIGKVCRTLLAKSVF
SILKVVRTLLTKSVF

SEQ ID NO: 270082 - protein, 15 aa, Artificial Sequence
  Description of Artificial Sequence: Synthetic peptide
  Seed: SIGKVCRTLLAKSVF
SILKVVRVLLHKSVF

SEQ ID NO: 270083 - protein, 15 aa, Artificial Sequence
  Description of Artificial Sequence: Synthetic peptide
  Seed: SIGKVCRTLLAKSVF
SILKVWRALLAKSVF

SEQ ID NO: 270084 - protein, 15 aa, Artificial Sequence
  Description of Artificial Sequence: Synthetic peptide
  Seed: SIGKVCRTLLAKSVF
SILKVWRALLGKSVF

SEQ ID NO: 270085 - protein, 15 aa, Artificial Sequence
  Description of Artificial Sequence: Synthetic peptide
  Seed: SIGKVCRTLLAKSVF
SILKVWRALLHKSVF

SEQ ID NO: 270086 - protein, 15 aa, Artificial Sequence
  Description of Artificial Sequence: Synthetic peptide
  Seed: SIGKVCRTLLAKSVF
SILKVWRALLKKSVF

SEQ ID NO: 270087 - protein, 15 aa, Artificial Sequence
  Description of Artificial Sequence: Synthetic peptide
  Seed: SIGKVCRTLLAKSVF
SILKVWRALLQKSVF

SEQ ID NO: 270088 - protein, 15 aa, Artificial Sequence
  Description of Artificial Sequence: Synthetic peptide
  Seed: SIGKVCRTLLAKSVF
SILKVWRALLRKSVF

SEQ ID NO: 270089 - protein, 15 aa, Artificial Sequence
  Description of Artificial Sequence: Synthetic peptide
  Seed: SIGKVCRTLLAKSVF
SILKVWRALLSKSVF

SEQ ID NO: 270090 - protein, 15 aa, Artificial Sequence
  Description of Artificial Sequence: Synthetic peptide
  Seed: SIGKVCRTLLAKSVF
SILKVWRALLTKSVF

SEQ ID NO: 270091 - protein, 15 aa, Artificial Sequence
  Description of Artificial Sequence: Synthetic peptide
  Seed: SIGKVCRTLLAKSVF
SILKVWRELLRKSVF

SEQ ID NO: 270092 - protein, 15 aa, Artificial Sequence
  Description of Artificial Sequence: Synthetic peptide
  Seed: SIGKVCRTLLAKSVF
SILKVWRGLLAKSVF

SEQ ID NO: 270093 - protein, 15 aa, Artificial Sequence
  Description of Artificial Sequence: Synthetic peptide
  Seed: SIGKVCRTLLAKSVF
SILKVWRGLLGKSVF

SEQ ID NO: 270094 - protein, 15 aa, Artificial Sequence
  Description of Artificial Sequence: Synthetic peptide
  Seed: SIGKVCRTLLAKSVF
SILKVWRGLLHKSVF

SEQ ID NO: 270095 - protein, 15 aa, Artificial Sequence
  Description of Artificial Sequence: Synthetic peptide
  Seed: SIGKVCRTLLAKSVF
SILKVWRGLLQKSVF

SEQ ID NO: 270096 - protein, 15 aa, Artificial Sequence
  Description of Artificial Sequence: Synthetic peptide
  Seed: SIGKVCRTLLAKSVF
SILKVWRGLLRKSVF

SEQ ID NO: 270097 - protein, 15 aa, Artificial Sequence
  Description of Artificial Sequence: Synthetic peptide
  Seed: SIGKVCRTLLAKSVF
SILKVWRGLLSKSVF

SEQ ID NO: 270098 - protein, 15 aa, Artificial Sequence
  Description of Artificial Sequence: Synthetic peptide
  Seed: SIGKVCRTLLAKSVF
SILKVWRHLLAKSVF

SEQ ID NO: 270099 - protein, 15 aa, Artificial Sequence
  Description of Artificial Sequence: Synthetic peptide
  Seed: SIGKVCRTLLAKSVF
SILKVWRHLLGKSVF

SEQ ID NO: 270100 - protein, 15 aa, Artificial Sequence
  Description of Artificial Sequence: Synthetic peptide
  Seed: SIGKVCRTLLAKSVF
SILKVWRHLLHKSVF

SEQ ID NO: 270101 - protein, 15 aa, Artificial Sequence
  Description of Artificial Sequence: Synthetic peptide
  Seed: SIGKVCRTLLAKSVF
SILKVWRHLLKKSVF

SEQ ID NO: 270102 - protein, 15 aa, Artificial Sequence
  Description of Artificial Sequence: Synthetic peptide
  Seed: SIGKVCRTLLAKSVF
SILKVWRHLLMKSVF

SEQ ID NO: 270103 - protein, 15 aa, Artificial Sequence
  Description of Artificial Sequence: Synthetic peptide
  Seed: SIGKVCRTLLAKSVF
SILKVWRHLLNKSVF

SEQ ID NO: 270104 - protein, 15 aa, Artificial Sequence
  Description of Artificial Sequence: Synthetic peptide
  Seed: SIGKVCRTLLAKSVF
SILKVWRHLLPKSVF

SEQ ID NO: 270105 - protein, 15 aa, Artificial Sequence
  Description of Artificial Sequence: Synthetic peptide
  Seed: SIGKVCRTLLAKSVF
SILKVWRHLLQKSVF

SEQ ID NO: 270106 - protein, 15 aa, Artificial Sequence
  Description of Artificial Sequence: Synthetic peptide
  Seed: SIGKVCRTLLAKSVF
SILKVWRHLLRKSVF

SEQ ID NO: 270107 - protein, 15 aa, Artificial Sequence
  Description of Artificial Sequence: Synthetic peptide
  Seed: SIGKVCRTLLAKSVF
SILKVWRHLLSKSVF

SEQ ID NO: 270108 - protein, 15 aa, Artificial Sequence
  Description of Artificial Sequence: Synthetic peptide
  Seed: SIGKVCRTLLAKSVF
SILKVWRHLLTKSVF

SEQ ID NO: 270109 - protein, 15 aa, Artificial Sequence
  Description of Artificial Sequence: Synthetic peptide
  Seed: SIGKVCRTLLAKSVF
SILKVWRHLLVKSVF

SEQ ID NO: 270110 - protein, 15 aa, Artificial Sequence
  Description of Artificial Sequence: Synthetic peptide
  Seed: SIGKVCRTLLAKSVF
SILKVWRHLLYKSVF

SEQ ID NO: 270111 - protein, 15 aa, Artificial Sequence
  Description of Artificial Sequence: Synthetic peptide
  Seed: SIGKVCRTLLAKSVF
SILKVWRILLHKSVF

SEQ ID NO: 270112 - protein, 15 aa, Artificial Sequence
  Description of Artificial Sequence: Synthetic peptide
  Seed: SIGKVCRTLLAKSVF
SILKVWRKLLAKSVF

SEQ ID NO: 270113 - protein, 15 aa, Artificial Sequence
  Description of Artificial Sequence: Synthetic peptide
  Seed: SIGKVCRTLLAKSVF
SILKVWRKLLCKSVF

SEQ ID NO: 270114 - protein, 15 aa, Artificial Sequence
  Description of Artificial Sequence: Synthetic peptide
  Seed: SIGKVCRTLLAKSVF
SILKVWRKLLDKSVF

SEQ ID NO: 270115 - protein, 15 aa, Artificial Sequence
  Description of Artificial Sequence: Synthetic peptide
  Seed: SIGKVCRTLLAKSVF
SILKVWRKLLEKSVF

SEQ ID NO: 270116 - protein, 15 aa, Artificial Sequence
  Description of Artificial Sequence: Synthetic peptide
  Seed: SIGKVCRTLLAKSVF
SILKVWRKLLFKSVF

SEQ ID NO: 270117 - protein, 15 aa, Artificial Sequence
  Description of Artificial Sequence: Synthetic peptide
  Seed: SIGKVCRTLLAKSVF
SILKVWRKLLGKSVF

SEQ ID NO: 270118 - protein, 15 aa, Artificial Sequence
  Description of Artificial Sequence: Synthetic peptide
  Seed: SIGKVCRTLLAKSVF
SILKVWRKLLHKSVF

SEQ ID NO: 270119 - protein, 15 aa, Artificial Sequence
  Description of Artificial Sequence: Synthetic peptide
  Seed: SIGKVCRTLLAKSVF
SILKVWRKLLIKSVF

SEQ ID NO: 270120 - protein, 15 aa, Artificial Sequence
  Description of Artificial Sequence: Synthetic peptide
  Seed: SIGKVCRTLLAKSVF
SILKVWRKLLKKSVF

SEQ ID NO: 270121 - protein, 15 aa, Artificial Sequence
  Description of Artificial Sequence: Synthetic peptide
  Seed: SIGKVCRTLLAKSVF
SILKVWRKLLLKSVF

SEQ ID NO: 270122 - protein, 15 aa, Artificial Sequence
  Description of Artificial Sequence: Synthetic peptide
  Seed: SIGKVCRTLLAKSVF
SILKVWRKLLMKSVF

SEQ ID NO: 270123 - protein, 15 aa, Artificial Sequence
  Description of Artificial Sequence: Synthetic peptide
  Seed: SIGKVCRTLLAKSVF
SILKVWRKLLNKSVF

SEQ ID NO: 270124 - protein, 15 aa, Artificial Sequence
  Description of Artificial Sequence: Synthetic peptide
  Seed: SIGKVCRTLLAKSVF
SILKVWRKLLPKSVF

SEQ ID NO: 270125 - protein, 15 aa, Artificial Sequence
  Description of Artificial Sequence: Synthetic peptide
  Seed: SIGKVCRTLLAKSVF
SILKVWRKLLQKSVF

SEQ ID NO: 270126 - protein, 15 aa, Artificial Sequence
  Description of Artificial Sequence: Synthetic peptide
  Seed: SIGKVCRTLLAKSVF
SILKVWRKLLRKSVF

SEQ ID NO: 270127 - protein, 15 aa, Artificial Sequence
  Description of Artificial Sequence: Synthetic peptide
  Seed: SIGKVCRTLLAKSVF
SILKVWRKLLSKSVF

SEQ ID NO: 270128 - protein, 15 aa, Artificial Sequence
  Description of Artificial Sequence: Synthetic peptide
  Seed: SIGKVCRTLLAKSVF
SILKVWRKLLTKSVF

SEQ ID NO: 270129 - protein, 15 aa, Artificial Sequence
  Description of Artificial Sequence: Synthetic peptide
  Seed: SIGKVCRTLLAKSVF
SILKVWRKLLVKSVF

SEQ ID NO: 270130 - protein, 15 aa, Artificial Sequence
  Description of Artificial Sequence: Synthetic peptide
  Seed: SIGKVCRTLLAKSVF
SILKVWRKLLWKSVF

SEQ ID NO: 270131 - protein, 15 aa, Artificial Sequence
  Description of Artificial Sequence: Synthetic peptide
  Seed: SIGKVCRTLLAKSVF
SILKVWRKLLYKSVF

SEQ ID NO: 270132 - protein, 15 aa, Artificial Sequence
  Description of Artificial Sequence: Synthetic peptide
  Seed: SIGKVCRTLLAKSVF
SILKVWRNLLAKSVF

SEQ ID NO: 270133 - protein, 15 aa, Artificial Sequence
  Description of Artificial Sequence: Synthetic peptide
  Seed: SIGKVCRTLLAKSVF
SILKVWRNLLGKSVF

SEQ ID NO: 270134 - protein, 15 aa, Artificial Sequence
  Description of Artificial Sequence: Synthetic peptide
  Seed: SIGKVCRTLLAKSVF
SILKVWRNLLHKSVF

SEQ ID NO: 270135 - protein, 15 aa, Artificial Sequence
  Description of Artificial Sequence: Synthetic peptide
  Seed: SIGKVCRTLLAKSVF
SILKVWRNLLKKSVF

SEQ ID NO: 270136 - protein, 15 aa, Artificial Sequence
  Description of Artificial Sequence: Synthetic peptide
  Seed: SIGKVCRTLLAKSVF
SILKVWRNLLQKSVF

SEQ ID NO: 270137 - protein, 15 aa, Artificial Sequence
  Description of Artificial Sequence: Synthetic peptide
  Seed: SIGKVCRTLLAKSVF
SILKVWRNLLRKSVF

SEQ ID NO: 270138 - protein, 15 aa, Artificial Sequence
  Description of Artificial Sequence: Synthetic peptide
  Seed: SIGKVCRTLLAKSVF
SILKVWRNLLSKSVF

SEQ ID NO: 270139 - protein, 15 aa, Artificial Sequence
  Description of Artificial Sequence: Synthetic peptide
  Seed: SIGKVCRTLLAKSVF
SILKVWRPLLAKSVF

SEQ ID NO: 270140 - protein, 15 aa, Artificial Sequence
  Description of Artificial Sequence: Synthetic peptide
  Seed: SIGKVCRTLLAKSVF
SILKVWRPLLGKSVF

SEQ ID NO: 270141 - protein, 15 aa, Artificial Sequence
  Description of Artificial Sequence: Synthetic peptide
  Seed: SIGKVCRTLLAKSVF
SILKVWRPLLHKSVF

SEQ ID NO: 270142 - protein, 15 aa, Artificial Sequence
  Description of Artificial Sequence: Synthetic peptide
  Seed: SIGKVCRTLLAKSVF
SILKVWRPLLIKSVF

SEQ ID NO: 270143 - protein, 15 aa, Artificial Sequence
  Description of Artificial Sequence: Synthetic peptide
  Seed: SIGKVCRTLLAKSVF
SILKVWRPLLMKSVF

SEQ ID NO: 270144 - protein, 15 aa, Artificial Sequence
  Description of Artificial Sequence: Synthetic peptide
  Seed: SIGKVCRTLLAKSVF
SILKVWRPLLQKSVF

SEQ ID NO: 270145 - protein, 15 aa, Artificial Sequence
  Description of Artificial Sequence: Synthetic peptide
  Seed: SIGKVCRTLLAKSVF
SILKVWRPLLRKSVF

SEQ ID NO: 270146 - protein, 15 aa, Artificial Sequence
  Description of Artificial Sequence: Synthetic peptide
  Seed: SIGKVCRTLLAKSVF
SILKVWRPLLSKSVF

SEQ ID NO: 270147 - protein, 15 aa, Artificial Sequence
  Description of Artificial Sequence: Synthetic peptide
  Seed: SIGKVCRTLLAKSVF
SILKVWRPLLTKSVF

SEQ ID NO: 270148 - protein, 15 aa, Artificial Sequence
  Description of Artificial Sequence: Synthetic peptide
  Seed: SIGKVCRTLLAKSVF
SILKVWRPLLVKSVF

SEQ ID NO: 270149 - protein, 15 aa, Artificial Sequence
  Description of Artificial Sequence: Synthetic peptide
  Seed: SIGKVCRTLLAKSVF
SILKVWRPLLYKSVF

SEQ ID NO: 270150 - protein, 15 aa, Artificial Sequence
  Description of Artificial Sequence: Synthetic peptide
  Seed: SIGKVCRTLLAKSVF
SILKVWRQLLAKSVF

SEQ ID NO: 270151 - protein, 15 aa, Artificial Sequence
  Description of Artificial Sequence: Synthetic peptide
  Seed: SIGKVCRTLLAKSVF
SILKVWRQLLHKSVF

SEQ ID NO: 270152 - protein, 15 aa, Artificial Sequence
  Description of Artificial Sequence: Synthetic peptide
  Seed: SIGKVCRTLLAKSVF
SILKVWRQLLKKSVF

SEQ ID NO: 270153 - protein, 15 aa, Artificial Sequence
  Description of Artificial Sequence: Synthetic peptide
  Seed: SIGKVCRTLLAKSVF
SILKVWRQLLRKSVF

SEQ ID NO: 270154 - protein, 15 aa, Artificial Sequence
  Description of Artificial Sequence: Synthetic peptide
  Seed: SIGKVCRTLLAKSVF
SILKVWRQLLSKSVF

SEQ ID NO: 270155 - protein, 15 aa, Artificial Sequence
  Description of Artificial Sequence: Synthetic peptide
  Seed: SIGKVCRTLLAKSVF
SILKVWRRLLAKSVF

SEQ ID NO: 270156 - protein, 15 aa, Artificial Sequence
  Description of Artificial Sequence: Synthetic peptide
  Seed: SIGKVCRTLLAKSVF
SILKVWRRLLCKSVF

SEQ ID NO: 270157 - protein, 15 aa, Artificial Sequence
  Description of Artificial Sequence: Synthetic peptide
  Seed: SIGKVCRTLLAKSVF
SILKVWRRLLDKSVF

SEQ ID NO: 270158 - protein, 15 aa, Artificial Sequence
  Description of Artificial Sequence: Synthetic peptide
  Seed: SIGKVCRTLLAKSVF
SILKVWRRLLEKSVF

SEQ ID NO: 270159 - protein, 15 aa, Artificial Sequence
  Description of Artificial Sequence: Synthetic peptide
  Seed: SIGKVCRTLLAKSVF
SILKVWRRLLFKSVF

SEQ ID NO: 270160 - protein, 15 aa, Artificial Sequence
  Description of Artificial Sequence: Synthetic peptide
  Seed: SIGKVCRTLLAKSVF
SILKVWRRLLGKSVF

SEQ ID NO: 270161 - protein, 15 aa, Artificial Sequence
  Description of Artificial Sequence: Synthetic peptide
  Seed: SIGKVCRTLLAKSVF
SILKVWRRLLHKSVF

SEQ ID NO: 270162 - protein, 15 aa, Artificial Sequence
  Description of Artificial Sequence: Synthetic peptide
  Seed: SIGKVCRTLLAKSVF
SILKVWRRLLIKSVF

SEQ ID NO: 270163 - protein, 15 aa, Artificial Sequence
  Description of Artificial Sequence: Synthetic peptide
  Seed: SIGKVCRTLLAKSVF
SILKVWRRLLKKSVF

SEQ ID NO: 270164 - protein, 15 aa, Artificial Sequence
  Description of Artificial Sequence: Synthetic peptide
  Seed: SIGKVCRTLLAKSVF
SILKVWRRLLLKSVF

SEQ ID NO: 270165 - protein, 15 aa, Artificial Sequence
  Description of Artificial Sequence: Synthetic peptide
  Seed: SIGKVCRTLLAKSVF
SILKVWRRLLMKSVF

SEQ ID NO: 270166 - protein, 15 aa, Artificial Sequence
  Description of Artificial Sequence: Synthetic peptide
  Seed: SIGKVCRTLLAKSVF
SILKVWRRLLNKSVF

SEQ ID NO: 270167 - protein, 15 aa, Artificial Sequence
  Description of Artificial Sequence: Synthetic peptide
  Seed: SIGKVCRTLLAKSVF
SILKVWRRLLPKSVF

SEQ ID NO: 270168 - protein, 15 aa, Artificial Sequence
  Description of Artificial Sequence: Synthetic peptide
  Seed: SIGKVCRTLLAKSVF
SILKVWRRLLQKSVF

SEQ ID NO: 270169 - protein, 15 aa, Artificial Sequence
  Description of Artificial Sequence: Synthetic peptide
  Seed: SIGKVCRTLLAKSVF
SILKVWRRLLRKSVF

SEQ ID NO: 270170 - protein, 15 aa, Artificial Sequence
  Description of Artificial Sequence: Synthetic peptide
  Seed: SIGKVCRTLLAKSVF
SILKVWRRLLSKSVF

SEQ ID NO: 270171 - protein, 15 aa, Artificial Sequence
  Description of Artificial Sequence: Synthetic peptide
  Seed: SIGKVCRTLLAKSVF
SILKVWRRLLTKSVF

SEQ ID NO: 270172 - protein, 15 aa, Artificial Sequence
  Description of Artificial Sequence: Synthetic peptide
  Seed: SIGKVCRTLLAKSVF
SILKVWRRLLVKSVF

SEQ ID NO: 270173 - protein, 15 aa, Artificial Sequence
  Description of Artificial Sequence: Synthetic peptide
  Seed: SIGKVCRTLLAKSVF
SILKVWRRLLWKSVF

SEQ ID NO: 270174 - protein, 15 aa, Artificial Sequence
  Description of Artificial Sequence: Synthetic peptide
  Seed: SIGKVCRTLLAKSVF
SILKVWRRLLYKSVF

SEQ ID NO: 270175 - protein, 15 aa, Artificial Sequence
  Description of Artificial Sequence: Synthetic peptide
  Seed: SIGKVCRTLLAKSVF
SILKVWRSLLAKSVF

SEQ ID NO: 270176 - protein, 15 aa, Artificial Sequence
  Description of Artificial Sequence: Synthetic peptide
  Seed: SIGKVCRTLLAKSVF
SILKVWRSLLGKSVF

SEQ ID NO: 270177 - protein, 15 aa, Artificial Sequence
  Description of Artificial Sequence: Synthetic peptide
  Seed: SIGKVCRTLLAKSVF
SILKVWRSLLHKSVF

SEQ ID NO: 270178 - protein, 15 aa, Artificial Sequence
  Description of Artificial Sequence: Synthetic peptide
  Seed: SIGKVCRTLLAKSVF
SILKVWRSLLKKSVF

SEQ ID NO: 270179 - protein, 15 aa, Artificial Sequence
  Description of Artificial Sequence: Synthetic peptide
  Seed: SIGKVCRTLLAKSVF
SILKVWRSLLQKSVF

SEQ ID NO: 270180 - protein, 15 aa, Artificial Sequence
  Description of Artificial Sequence: Synthetic peptide
  Seed: SIGKVCRTLLAKSVF
SILKVWRSLLRKSVF

SEQ ID NO: 270181 - protein, 15 aa, Artificial Sequence
  Description of Artificial Sequence: Synthetic peptide
  Seed: SIGKVCRTLLAKSVF
SILKVWRSLLSKSVF

SEQ ID NO: 270182 - protein, 15 aa, Artificial Sequence
  Description of Artificial Sequence: Synthetic peptide
  Seed: SIGKVCRTLLAKSVF
SILKVWRSLLTKSVF

SEQ ID NO: 270183 - protein, 15 aa, Artificial Sequence
  Description of Artificial Sequence: Synthetic peptide
  Seed: SIGKVCRTLLAKSVF
SILKVWRTLLAKSVF

SEQ ID NO: 270184 - protein, 15 aa, Artificial Sequence
  Description of Artificial Sequence: Synthetic peptide
  Seed: SIGKVCRTLLAKSVF
SILKVWRTLLGKSVF

SEQ ID NO: 270185 - protein, 15 aa, Artificial Sequence
  Description of Artificial Sequence: Synthetic peptide
  Seed: SIGKVCRTLLAKSVF
SILKVWRTLLHKSVF

SEQ ID NO: 270186 - protein, 15 aa, Artificial Sequence
  Description of Artificial Sequence: Synthetic peptide
  Seed: SIGKVCRTLLAKSVF
SILKVWRTLLKKSVF

SEQ ID NO: 270187 - protein, 15 aa, Artificial Sequence
  Description of Artificial Sequence: Synthetic peptide
  Seed: SIGKVCRTLLAKSVF
SILKVWRTLLQKSVF

SEQ ID NO: 270188 - protein, 15 aa, Artificial Sequence
  Description of Artificial Sequence: Synthetic peptide
  Seed: SIGKVCRTLLAKSVF
SILKVWRTLLRKSVF

SEQ ID NO: 270189 - protein, 15 aa, Artificial Sequence
  Description of Artificial Sequence: Synthetic peptide
  Seed: SIGKVCRTLLAKSVF
SILKVWRTLLSKSVF

SEQ ID NO: 270190 - protein, 15 aa, Artificial Sequence
  Description of Artificial Sequence: Synthetic peptide
  Seed: SIGKVCRTLLAKSVF
SILKVWRVLLHKSVF

SEQ ID NO: 270191 - protein, 15 aa, Artificial Sequence
  Description of Artificial Sequence: Synthetic peptide
  Seed: SIGKVCRTLLAKSVF
SILKVWRVLLRKSVF

SEQ ID NO: 270192 - protein, 15 aa, Artificial Sequence
  Description of Artificial Sequence: Synthetic peptide
  Seed: SIGKVCRTLLAKSVF
SILKVYRALLAKSVF

SEQ ID NO: 270193 - protein, 15 aa, Artificial Sequence
  Description of Artificial Sequence: Synthetic peptide
  Seed: SIGKVCRTLLAKSVF
SILKVYRALLGKSVF

SEQ ID NO: 270194 - protein, 15 aa, Artificial Sequence
  Description of Artificial Sequence: Synthetic peptide
  Seed: SIGKVCRTLLAKSVF
SILKVYRALLHKSVF

SEQ ID NO: 270195 - protein, 15 aa, Artificial Sequence
  Description of Artificial Sequence: Synthetic peptide
  Seed: SIGKVCRTLLAKSVF
SILKVYRALLQKSVF

SEQ ID NO: 270196 - protein, 15 aa, Artificial Sequence
  Description of Artificial Sequence: Synthetic peptide
  Seed: SIGKVCRTLLAKSVF
SILKVYRALLRKSVF

SEQ ID NO: 270197 - protein, 15 aa, Artificial Sequence
  Description of Artificial Sequence: Synthetic peptide
  Seed: SIGKVCRTLLAKSVF
SILKVYRALLSKSVF

SEQ ID NO: 270198 - protein, 15 aa, Artificial Sequence
  Description of Artificial Sequence: Synthetic peptide
  Seed: SIGKVCRTLLAKSVF
SILKVYRELLRKSVF

SEQ ID NO: 270199 - protein, 15 aa, Artificial Sequence
  Description of Artificial Sequence: Synthetic peptide
  Seed: SIGKVCRTLLAKSVF
SILKVYRGLLAKSVF

SEQ ID NO: 270200 - protein, 15 aa, Artificial Sequence
  Description of Artificial Sequence: Synthetic peptide
  Seed: SIGKVCRTLLAKSVF
SILKVYRGLLSKSVF

SEQ ID NO: 270201 - protein, 15 aa, Artificial Sequence
  Description of Artificial Sequence: Synthetic peptide
  Seed: SIGKVCRTLLAKSVF
SILKVYRHLLAKSVF

SEQ ID NO: 270202 - protein, 15 aa, Artificial Sequence
  Description of Artificial Sequence: Synthetic peptide
  Seed: SIGKVCRTLLAKSVF
SILKVYRHLLGKSVF

SEQ ID NO: 270203 - protein, 15 aa, Artificial Sequence
  Description of Artificial Sequence: Synthetic peptide
  Seed: SIGKVCRTLLAKSVF
SILKVYRHLLHKSVF

SEQ ID NO: 270204 - protein, 15 aa, Artificial Sequence
  Description of Artificial Sequence: Synthetic peptide
  Seed: SIGKVCRTLLAKSVF
SILKVYRHLLMKSVF

SEQ ID NO: 270205 - protein, 15 aa, Artificial Sequence
  Description of Artificial Sequence: Synthetic peptide
  Seed: SIGKVCRTLLAKSVF
SILKVYRHLLNKSVF

SEQ ID NO: 270206 - protein, 15 aa, Artificial Sequence
  Description of Artificial Sequence: Synthetic peptide
  Seed: SIGKVCRTLLAKSVF
SILKVYRHLLQKSVF

SEQ ID NO: 270207 - protein, 15 aa, Artificial Sequence
  Description of Artificial Sequence: Synthetic peptide
  Seed: SIGKVCRTLLAKSVF
SILKVYRHLLRKSVF

SEQ ID NO: 270208 - protein, 15 aa, Artificial Sequence
  Description of Artificial Sequence: Synthetic peptide
  Seed: SIGKVCRTLLAKSVF
SILKVYRHLLSKSVF

SEQ ID NO: 270209 - protein, 15 aa, Artificial Sequence
  Description of Artificial Sequence: Synthetic peptide
  Seed: SIGKVCRTLLAKSVF
SILKVYRHLLTKSVF

SEQ ID NO: 270210 - protein, 15 aa, Artificial Sequence
  Description of Artificial Sequence: Synthetic peptide
  Seed: SIGKVCRTLLAKSVF
SILKVYRHLLVKSVF

SEQ ID NO: 270211 - protein, 15 aa, Artificial Sequence
  Description of Artificial Sequence: Synthetic peptide
  Seed: SIGKVCRTLLAKSVF
SILKVYRHLLYKSVF

SEQ ID NO: 270212 - protein, 15 aa, Artificial Sequence
  Description of Artificial Sequence: Synthetic peptide
  Seed: SIGKVCRTLLAKSVF
SILKVYRKLLAKSVF

SEQ ID NO: 270213 - protein, 15 aa, Artificial Sequence
  Description of Artificial Sequence: Synthetic peptide
  Seed: SIGKVCRTLLAKSVF
SILKVYRKLLDKSVF

SEQ ID NO: 270214 - protein, 15 aa, Artificial Sequence
  Description of Artificial Sequence: Synthetic peptide
  Seed: SIGKVCRTLLAKSVF
SILKVYRKLLEKSVF

SEQ ID NO: 270215 - protein, 15 aa, Artificial Sequence
  Description of Artificial Sequence: Synthetic peptide
  Seed: SIGKVCRTLLAKSVF
SILKVYRKLLFKSVF

SEQ ID NO: 270216 - protein, 15 aa, Artificial Sequence
  Description of Artificial Sequence: Synthetic peptide
  Seed: SIGKVCRTLLAKSVF
SILKVYRKLLGKSVF

SEQ ID NO: 270217 - protein, 15 aa, Artificial Sequence
  Description of Artificial Sequence: Synthetic peptide
  Seed: SIGKVCRTLLAKSVF
SILKVYRKLLHKSVF

SEQ ID NO: 270218 - protein, 15 aa, Artificial Sequence
  Description of Artificial Sequence: Synthetic peptide
  Seed: SIGKVCRTLLAKSVF
SILKVYRKLLIKSVF

SEQ ID NO: 270219 - protein, 15 aa, Artificial Sequence
  Description of Artificial Sequence: Synthetic peptide
  Seed: SIGKVCRTLLAKSVF
SILKVYRKLLKKSVF

SEQ ID NO: 270220 - protein, 15 aa, Artificial Sequence
  Description of Artificial Sequence: Synthetic peptide
  Seed: SIGKVCRTLLAKSVF
SILKVYRKLLLKSVF

SEQ ID NO: 270221 - protein, 15 aa, Artificial Sequence
  Description of Artificial Sequence: Synthetic peptide
  Seed: SIGKVCRTLLAKSVF
SILKVYRKLLMKSVF

SEQ ID NO: 270222 - protein, 15 aa, Artificial Sequence
  Description of Artificial Sequence: Synthetic peptide
  Seed: SIGKVCRTLLAKSVF
SILKVYRKLLNKSVF

SEQ ID NO: 270223 - protein, 15 aa, Artificial Sequence
  Description of Artificial Sequence: Synthetic peptide
  Seed: SIGKVCRTLLAKSVF
SILKVYRKLLPKSVF

SEQ ID NO: 270224 - protein, 15 aa, Artificial Sequence
  Description of Artificial Sequence: Synthetic peptide
  Seed: SIGKVCRTLLAKSVF
SILKVYRKLLQKSVF

SEQ ID NO: 270225 - protein, 15 aa, Artificial Sequence
  Description of Artificial Sequence: Synthetic peptide
  Seed: SIGKVCRTLLAKSVF
SILKVYRKLLRKSVF

SEQ ID NO: 270226 - protein, 15 aa, Artificial Sequence
  Description of Artificial Sequence: Synthetic peptide
  Seed: SIGKVCRTLLAKSVF
SILKVYRKLLSKSVF

SEQ ID NO: 270227 - protein, 15 aa, Artificial Sequence
  Description of Artificial Sequence: Synthetic peptide
  Seed: SIGKVCRTLLAKSVF
SILKVYRKLLTKSVF

SEQ ID NO: 270228 - protein, 15 aa, Artificial Sequence
  Description of Artificial Sequence: Synthetic peptide
  Seed: SIGKVCRTLLAKSVF
SILKVYRKLLVKSVF

SEQ ID NO: 270229 - protein, 15 aa, Artificial Sequence
  Description of Artificial Sequence: Synthetic peptide
  Seed: SIGKVCRTLLAKSVF
SILKVYRKLLWKSVF

SEQ ID NO: 270230 - protein, 15 aa, Artificial Sequence
  Description of Artificial Sequence: Synthetic peptide
  Seed: SIGKVCRTLLAKSVF
SILKVYRKLLYKSVF

SEQ ID NO: 270231 - protein, 15 aa, Artificial Sequence
  Description of Artificial Sequence: Synthetic peptide
  Seed: SIGKVCRTLLAKSVF
SILKVYRNLLAKSVF

SEQ ID NO: 270232 - protein, 15 aa, Artificial Sequence
  Description of Artificial Sequence: Synthetic peptide
  Seed: SIGKVCRTLLAKSVF
SILKVYRNLLHKSVF

SEQ ID NO: 270233 - protein, 15 aa, Artificial Sequence
  Description of Artificial Sequence: Synthetic peptide
  Seed: SIGKVCRTLLAKSVF
SILKVYRNLLRKSVF

SEQ ID NO: 270234 - protein, 15 aa, Artificial Sequence
  Description of Artificial Sequence: Synthetic peptide
  Seed: SIGKVCRTLLAKSVF
SILKVYRNLLSKSVF

SEQ ID NO: 270235 - protein, 15 aa, Artificial Sequence
  Description of Artificial Sequence: Synthetic peptide
  Seed: SIGKVCRTLLAKSVF
SILKVYRPLLAKSVF

SEQ ID NO: 270236 - protein, 15 aa, Artificial Sequence
  Description of Artificial Sequence: Synthetic peptide
  Seed: SIGKVCRTLLAKSVF
SILKVYRPLLGKSVF

SEQ ID NO: 270237 - protein, 15 aa, Artificial Sequence
  Description of Artificial Sequence: Synthetic peptide
  Seed: SIGKVCRTLLAKSVF
SILKVYRPLLHKSVF

SEQ ID NO: 270238 - protein, 15 aa, Artificial Sequence
  Description of Artificial Sequence: Synthetic peptide
  Seed: SIGKVCRTLLAKSVF
SILKVYRPLLQKSVF

SEQ ID NO: 270239 - protein, 15 aa, Artificial Sequence
  Description of Artificial Sequence: Synthetic peptide
  Seed: SIGKVCRTLLAKSVF
SILKVYRPLLSKSVF

SEQ ID NO: 270240 - protein, 15 aa, Artificial Sequence
  Description of Artificial Sequence: Synthetic peptide
  Seed: SIGKVCRTLLAKSVF
SILKVYRQLLRKSVF

SEQ ID NO: 270241 - protein, 15 aa, Artificial Sequence
  Description of Artificial Sequence: Synthetic peptide
  Seed: SIGKVCRTLLAKSVF
SILKVYRRLLAKSVF

SEQ ID NO: 270242 - protein, 15 aa, Artificial Sequence
  Description of Artificial Sequence: Synthetic peptide
  Seed: SIGKVCRTLLAKSVF
SILKVYRRLLCKSVF

SEQ ID NO: 270243 - protein, 15 aa, Artificial Sequence
  Description of Artificial Sequence: Synthetic peptide
  Seed: SIGKVCRTLLAKSVF
SILKVYRRLLDKSVF

SEQ ID NO: 270244 - protein, 15 aa, Artificial Sequence
  Description of Artificial Sequence: Synthetic peptide
  Seed: SIGKVCRTLLAKSVF
SILKVYRRLLEKSVF

SEQ ID NO: 270245 - protein, 15 aa, Artificial Sequence
  Description of Artificial Sequence: Synthetic peptide
  Seed: SIGKVCRTLLAKSVF
SILKVYRRLLFKSVF

SEQ ID NO: 270246 - protein, 15 aa, Artificial Sequence
  Description of Artificial Sequence: Synthetic peptide
  Seed: SIGKVCRTLLAKSVF
SILKVYRRLLGKSVF

SEQ ID NO: 270247 - protein, 15 aa, Artificial Sequence
  Description of Artificial Sequence: Synthetic peptide
  Seed: SIGKVCRTLLAKSVF
SILKVYRRLLHKSVF

SEQ ID NO: 270248 - protein, 15 aa, Artificial Sequence
  Description of Artificial Sequence: Synthetic peptide
  Seed: SIGKVCRTLLAKSVF
SILKVYRRLLIKSVF

SEQ ID NO: 270249 - protein, 15 aa, Artificial Sequence
  Description of Artificial Sequence: Synthetic peptide
  Seed: SIGKVCRTLLAKSVF
SILKVYRRLLKKSVF

SEQ ID NO: 270250 - protein, 15 aa, Artificial Sequence
  Description of Artificial Sequence: Synthetic peptide
  Seed: SIGKVCRTLLAKSVF
SILKVYRRLLLKSVF

SEQ ID NO: 270251 - protein, 15 aa, Artificial Sequence
  Description of Artificial Sequence: Synthetic peptide
  Seed: SIGKVCRTLLAKSVF
SILKVYRRLLMKSVF

SEQ ID NO: 270252 - protein, 15 aa, Artificial Sequence
  Description of Artificial Sequence: Synthetic peptide
  Seed: SIGKVCRTLLAKSVF
SILKVYRRLLNKSVF

SEQ ID NO: 270253 - protein, 15 aa, Artificial Sequence
  Description of Artificial Sequence: Synthetic peptide
  Seed: SIGKVCRTLLAKSVF
SILKVYRRLLPKSVF

SEQ ID NO: 270254 - protein, 15 aa, Artificial Sequence
  Description of Artificial Sequence: Synthetic peptide
  Seed: SIGKVCRTLLAKSVF
SILKVYRRLLQKSVF

SEQ ID NO: 270255 - protein, 15 aa, Artificial Sequence
  Description of Artificial Sequence: Synthetic peptide
  Seed: SIGKVCRTLLAKSVF
SILKVYRRLLRKSVF

SEQ ID NO: 270256 - protein, 15 aa, Artificial Sequence
  Description of Artificial Sequence: Synthetic peptide
  Seed: SIGKVCRTLLAKSVF
SILKVYRRLLSKSVF

SEQ ID NO: 270257 - protein, 15 aa, Artificial Sequence
  Description of Artificial Sequence: Synthetic peptide
  Seed: SIGKVCRTLLAKSVF
SILKVYRRLLTKSVF

SEQ ID NO: 270258 - protein, 15 aa, Artificial Sequence
  Description of Artificial Sequence: Synthetic peptide
  Seed: SIGKVCRTLLAKSVF
SILKVYRRLLVKSVF

SEQ ID NO: 270259 - protein, 15 aa, Artificial Sequence
  Description of Artificial Sequence: Synthetic peptide
  Seed: SIGKVCRTLLAKSVF
SILKVYRRLLYKSVF

SEQ ID NO: 270260 - protein, 15 aa, Artificial Sequence
  Description of Artificial Sequence: Synthetic peptide
  Seed: SIGKVCRTLLAKSVF
SILKVYRSLLAKSVF

SEQ ID NO: 270261 - protein, 15 aa, Artificial Sequence
  Description of Artificial Sequence: Synthetic peptide
  Seed: SIGKVCRTLLAKSVF
SILKVYRSLLGKSVF

SEQ ID NO: 270262 - protein, 15 aa, Artificial Sequence
  Description of Artificial Sequence: Synthetic peptide
  Seed: SIGKVCRTLLAKSVF
SILKVYRSLLHKSVF

SEQ ID NO: 270263 - protein, 15 aa, Artificial Sequence
  Description of Artificial Sequence: Synthetic peptide
  Seed: SIGKVCRTLLAKSVF
SILKVYRSLLRKSVF

SEQ ID NO: 270264 - protein, 15 aa, Artificial Sequence
  Description of Artificial Sequence: Synthetic peptide
  Seed: SIGKVCRTLLAKSVF
SILKVYRSLLSKSVF

SEQ ID NO: 270265 - protein, 15 aa, Artificial Sequence
  Description of Artificial Sequence: Synthetic peptide
  Seed: SIGKVCRTLLAKSVF
SILKVYRTLLAKSVF

SEQ ID NO: 270266 - protein, 15 aa, Artificial Sequence
  Description of Artificial Sequence: Synthetic peptide
  Seed: SIGKVCRTLLAKSVF
SILKVYRTLLHKSVF

SEQ ID NO: 270267 - protein, 15 aa, Artificial Sequence
  Description of Artificial Sequence: Synthetic peptide
  Seed: SIGKVCRTLLAKSVF
SILKVYRTLLKKSVF

SEQ ID NO: 270268 - protein, 15 aa, Artificial Sequence
  Description of Artificial Sequence: Synthetic peptide
  Seed: SIGKVCRTLLAKSVF
SILKVYRTLLRKSVF

SEQ ID NO: 270269 - protein, 15 aa, Artificial Sequence
  Description of Artificial Sequence: Synthetic peptide
  Seed: SIGKVCRTLLAKSVF
SILKVYRTLLSKSVF

SEQ ID NO: 270270 - protein, 15 aa, Artificial Sequence
  Description of Artificial Sequence: Synthetic peptide
  Seed: SIGKVCRTLLAKSVF
SILKVYRVLLHKSVF

SEQ ID NO: 270271 - protein, 15 aa, Artificial Sequence
  Description of Artificial Sequence: Synthetic peptide
  Seed: SIGKVCRTLLAKSVF
SIMKVARALLAKSVF

SEQ ID NO: 270272 - protein, 15 aa, Artificial Sequence
  Description of Artificial Sequence: Synthetic peptide
  Seed: SIGKVCRTLLAKSVF
SIMKVARALLGKSVF

SEQ ID NO: 270273 - protein, 15 aa, Artificial Sequence
  Description of Artificial Sequence: Synthetic peptide
  Seed: SIGKVCRTLLAKSVF
SIMKVARALLHKSVF

SEQ ID NO: 270274 - protein, 15 aa, Artificial Sequence
  Description of Artificial Sequence: Synthetic peptide
  Seed: SIGKVCRTLLAKSVF
SIMKVARALLKKSVF

SEQ ID NO: 270275 - protein, 15 aa, Artificial Sequence
  Description of Artificial Sequence: Synthetic peptide
  Seed: SIGKVCRTLLAKSVF
SIMKVARALLNKSVF

SEQ ID NO: 270276 - protein, 15 aa, Artificial Sequence
  Description of Artificial Sequence: Synthetic peptide
  Seed: SIGKVCRTLLAKSVF
SIMKVARALLQKSVF

SEQ ID NO: 270277 - protein, 15 aa, Artificial Sequence
  Description of Artificial Sequence: Synthetic peptide
  Seed: SIGKVCRTLLAKSVF
SIMKVARALLRKSVF

SEQ ID NO: 270278 - protein, 15 aa, Artificial Sequence
  Description of Artificial Sequence: Synthetic peptide
  Seed: SIGKVCRTLLAKSVF
SIMKVARALLSKSVF

SEQ ID NO: 270279 - protein, 15 aa, Artificial Sequence
  Description of Artificial Sequence: Synthetic peptide
  Seed: SIGKVCRTLLAKSVF
SIMKVARALLTKSVF

SEQ ID NO: 270280 - protein, 15 aa, Artificial Sequence
  Description of Artificial Sequence: Synthetic peptide
  Seed: SIGKVCRTLLAKSVF
SIMKVARALLYKSVF

SEQ ID NO: 270281 - protein, 15 aa, Artificial Sequence
  Description of Artificial Sequence: Synthetic peptide
  Seed: SIGKVCRTLLAKSVF
SIMKVARGLLAKSVF

SEQ ID NO: 270282 - protein, 15 aa, Artificial Sequence
  Description of Artificial Sequence: Synthetic peptide
  Seed: SIGKVCRTLLAKSVF
SIMKVARGLLGKSVF

SEQ ID NO: 270283 - protein, 15 aa, Artificial Sequence
  Description of Artificial Sequence: Synthetic peptide
  Seed: SIGKVCRTLLAKSVF
SIMKVARGLLQKSVF

SEQ ID NO: 270284 - protein, 15 aa, Artificial Sequence
  Description of Artificial Sequence: Synthetic peptide
  Seed: SIGKVCRTLLAKSVF
SIMKVARGLLRKSVF

SEQ ID NO: 270285 - protein, 15 aa, Artificial Sequence
  Description of Artificial Sequence: Synthetic peptide
  Seed: SIGKVCRTLLAKSVF
SIMKVARGLLSKSVF

SEQ ID NO: 270286 - protein, 15 aa, Artificial Sequence
  Description of Artificial Sequence: Synthetic peptide
  Seed: SIGKVCRTLLAKSVF
SIMKVARHLLAKSVF

SEQ ID NO: 270287 - protein, 15 aa, Artificial Sequence
  Description of Artificial Sequence: Synthetic peptide
  Seed: SIGKVCRTLLAKSVF
SIMKVARHLLGKSVF

SEQ ID NO: 270288 - protein, 15 aa, Artificial Sequence
  Description of Artificial Sequence: Synthetic peptide
  Seed: SIGKVCRTLLAKSVF
SIMKVARHLLHKSVF

SEQ ID NO: 270289 - protein, 15 aa, Artificial Sequence
  Description of Artificial Sequence: Synthetic peptide
  Seed: SIGKVCRTLLAKSVF
SIMKVARHLLIKSVF

SEQ ID NO: 270290 - protein, 15 aa, Artificial Sequence
  Description of Artificial Sequence: Synthetic peptide
  Seed: SIGKVCRTLLAKSVF
SIMKVARHLLKKSVF

SEQ ID NO: 270291 - protein, 15 aa, Artificial Sequence
  Description of Artificial Sequence: Synthetic peptide
  Seed: SIGKVCRTLLAKSVF
SIMKVARHLLLKSVF

SEQ ID NO: 270292 - protein, 15 aa, Artificial Sequence
  Description of Artificial Sequence: Synthetic peptide
  Seed: SIGKVCRTLLAKSVF
SIMKVARHLLMKSVF

SEQ ID NO: 270293 - protein, 15 aa, Artificial Sequence
  Description of Artificial Sequence: Synthetic peptide
  Seed: SIGKVCRTLLAKSVF
SIMKVARHLLNKSVF

SEQ ID NO: 270294 - protein, 15 aa, Artificial Sequence
  Description of Artificial Sequence: Synthetic peptide
  Seed: SIGKVCRTLLAKSVF
SIMKVARHLLPKSVF

SEQ ID NO: 270295 - protein, 15 aa, Artificial Sequence
  Description of Artificial Sequence: Synthetic peptide
  Seed: SIGKVCRTLLAKSVF
SIMKVARHLLQKSVF

SEQ ID NO: 270296 - protein, 15 aa, Artificial Sequence
  Description of Artificial Sequence: Synthetic peptide
  Seed: SIGKVCRTLLAKSVF
SIMKVARHLLRKSVF

SEQ ID NO: 270297 - protein, 15 aa, Artificial Sequence
  Description of Artificial Sequence: Synthetic peptide
  Seed: SIGKVCRTLLAKSVF
SIMKVARHLLSKSVF

SEQ ID NO: 270298 - protein, 15 aa, Artificial Sequence
  Description of Artificial Sequence: Synthetic peptide
  Seed: SIGKVCRTLLAKSVF
SIMKVARHLLTKSVF

SEQ ID NO: 270299 - protein, 15 aa, Artificial Sequence
  Description of Artificial Sequence: Synthetic peptide
  Seed: SIGKVCRTLLAKSVF
SIMKVARHLLVKSVF

SEQ ID NO: 270300 - protein, 15 aa, Artificial Sequence
  Description of Artificial Sequence: Synthetic peptide
  Seed: SIGKVCRTLLAKSVF
SIMKVARHLLYKSVF

SEQ ID NO: 270301 - protein, 15 aa, Artificial Sequence
  Description of Artificial Sequence: Synthetic peptide
  Seed: SIGKVCRTLLAKSVF
SIMKVARILLAKSVF

SEQ ID NO: 270302 - protein, 15 aa, Artificial Sequence
  Description of Artificial Sequence: Synthetic peptide
  Seed: SIGKVCRTLLAKSVF
SIMKVARILLGKSVF

SEQ ID NO: 270303 - protein, 15 aa, Artificial Sequence
  Description of Artificial Sequence: Synthetic peptide
  Seed: SIGKVCRTLLAKSVF
SIMKVARILLHKSVF

SEQ ID NO: 270304 - protein, 15 aa, Artificial Sequence
  Description of Artificial Sequence: Synthetic peptide
  Seed: SIGKVCRTLLAKSVF
SIMKVARILLRKSVF

SEQ ID NO: 270305 - protein, 15 aa, Artificial Sequence
  Description of Artificial Sequence: Synthetic peptide
  Seed: SIGKVCRTLLAKSVF
SIMKVARILLSKSVF

SEQ ID NO: 270306 - protein, 15 aa, Artificial Sequence
  Description of Artificial Sequence: Synthetic peptide
  Seed: SIGKVCRTLLAKSVF
SIMKVARKLLAKSVF

SEQ ID NO: 270307 - protein, 15 aa, Artificial Sequence
  Description of Artificial Sequence: Synthetic peptide
  Seed: SIGKVCRTLLAKSVF
SIMKVARKLLCKSVF

SEQ ID NO: 270308 - protein, 15 aa, Artificial Sequence
  Description of Artificial Sequence: Synthetic peptide
  Seed: SIGKVCRTLLAKSVF
SIMKVARKLLDKSVF

SEQ ID NO: 270309 - protein, 15 aa, Artificial Sequence
  Description of Artificial Sequence: Synthetic peptide
  Seed: SIGKVCRTLLAKSVF
SIMKVARKLLEKSVF

SEQ ID NO: 270310 - protein, 15 aa, Artificial Sequence
  Description of Artificial Sequence: Synthetic peptide
  Seed: SIGKVCRTLLAKSVF
SIMKVARKLLFKSVF

SEQ ID NO: 270311 - protein, 15 aa, Artificial Sequence
  Description of Artificial Sequence: Synthetic peptide
  Seed: SIGKVCRTLLAKSVF
SIMKVARKLLGKSVF

SEQ ID NO: 270312 - protein, 15 aa, Artificial Sequence
  Description of Artificial Sequence: Synthetic peptide
  Seed: SIGKVCRTLLAKSVF
SIMKVARKLLHKSVF

SEQ ID NO: 270313 - protein, 15 aa, Artificial Sequence
  Description of Artificial Sequence: Synthetic peptide
  Seed: SIGKVCRTLLAKSVF
SIMKVARKLLIKSVF

SEQ ID NO: 270314 - protein, 15 aa, Artificial Sequence
  Description of Artificial Sequence: Synthetic peptide
  Seed: SIGKVCRTLLAKSVF
SIMKVARKLLKKSVF

SEQ ID NO: 270315 - protein, 15 aa, Artificial Sequence
  Description of Artificial Sequence: Synthetic peptide
  Seed: SIGKVCRTLLAKSVF
SIMKVARKLLLKSVF

SEQ ID NO: 270316 - protein, 15 aa, Artificial Sequence
  Description of Artificial Sequence: Synthetic peptide
  Seed: SIGKVCRTLLAKSVF
SIMKVARKLLMKSVF

SEQ ID NO: 270317 - protein, 15 aa, Artificial Sequence
  Description of Artificial Sequence: Synthetic peptide
  Seed: SIGKVCRTLLAKSVF
SIMKVARKLLNKSVF

SEQ ID NO: 270318 - protein, 15 aa, Artificial Sequence
  Description of Artificial Sequence: Synthetic peptide
  Seed: SIGKVCRTLLAKSVF
SIMKVARKLLPKSVF

SEQ ID NO: 270319 - protein, 15 aa, Artificial Sequence
  Description of Artificial Sequence: Synthetic peptide
  Seed: SIGKVCRTLLAKSVF
SIMKVARKLLQKSVF

SEQ ID NO: 270320 - protein, 15 aa, Artificial Sequence
  Description of Artificial Sequence: Synthetic peptide
  Seed: SIGKVCRTLLAKSVF
SIMKVARKLLRKSVF

SEQ ID NO: 270321 - protein, 15 aa, Artificial Sequence
  Description of Artificial Sequence: Synthetic peptide
  Seed: SIGKVCRTLLAKSVF
SIMKVARKLLSKSVF

SEQ ID NO: 270322 - protein, 15 aa, Artificial Sequence
  Description of Artificial Sequence: Synthetic peptide
  Seed: SIGKVCRTLLAKSVF
SIMKVARKLLTKSVF

SEQ ID NO: 270323 - protein, 15 aa, Artificial Sequence
  Description of Artificial Sequence: Synthetic peptide
  Seed: SIGKVCRTLLAKSVF
SIMKVARKLLVKSVF

SEQ ID NO: 270324 - protein, 15 aa, Artificial Sequence
  Description of Artificial Sequence: Synthetic peptide
  Seed: SIGKVCRTLLAKSVF
SIMKVARKLLWKSVF

SEQ ID NO: 270325 - protein, 15 aa, Artificial Sequence
  Description of Artificial Sequence: Synthetic peptide
  Seed: SIGKVCRTLLAKSVF
SIMKVARKLLYKSVF

SEQ ID NO: 270326 - protein, 15 aa, Artificial Sequence
  Description of Artificial Sequence: Synthetic peptide
  Seed: SIGKVCRTLLAKSVF
SIMKVARLLLSKSVF

SEQ ID NO: 270327 - protein, 15 aa, Artificial Sequence
  Description of Artificial Sequence: Synthetic peptide
  Seed: SIGKVCRTLLAKSVF
SIMKVARMLLSKSVF

SEQ ID NO: 270328 - protein, 15 aa, Artificial Sequence
  Description of Artificial Sequence: Synthetic peptide
  Seed: SIGKVCRTLLAKSVF
SIMKVARNLLAKSVF

SEQ ID NO: 270329 - protein, 15 aa, Artificial Sequence
  Description of Artificial Sequence: Synthetic peptide
  Seed: SIGKVCRTLLAKSVF
SIMKVARNLLGKSVF

SEQ ID NO: 270330 - protein, 15 aa, Artificial Sequence
  Description of Artificial Sequence: Synthetic peptide
  Seed: SIGKVCRTLLAKSVF
SIMKVARNLLHKSVF

SEQ ID NO: 270331 - protein, 15 aa, Artificial Sequence
  Description of Artificial Sequence: Synthetic peptide
  Seed: SIGKVCRTLLAKSVF
SIMKVARNLLQKSVF

SEQ ID NO: 270332 - protein, 15 aa, Artificial Sequence
  Description of Artificial Sequence: Synthetic peptide
  Seed: SIGKVCRTLLAKSVF
SIMKVARNLLRKSVF

SEQ ID NO: 270333 - protein, 15 aa, Artificial Sequence
  Description of Artificial Sequence: Synthetic peptide
  Seed: SIGKVCRTLLAKSVF
SIMKVARNLLSKSVF

SEQ ID NO: 270334 - protein, 15 aa, Artificial Sequence
  Description of Artificial Sequence: Synthetic peptide
  Seed: SIGKVCRTLLAKSVF
SIMKVARNLLTKSVF

SEQ ID NO: 270335 - protein, 15 aa, Artificial Sequence
  Description of Artificial Sequence: Synthetic peptide
  Seed: SIGKVCRTLLAKSVF
SIMKVARNLLVKSVF

SEQ ID NO: 270336 - protein, 15 aa, Artificial Sequence
  Description of Artificial Sequence: Synthetic peptide
  Seed: SIGKVCRTLLAKSVF
SIMKVARNLLYKSVF

SEQ ID NO: 270337 - protein, 15 aa, Artificial Sequence
  Description of Artificial Sequence: Synthetic peptide
  Seed: SIGKVCRTLLAKSVF
SIMKVARPLLAKSVF

SEQ ID NO: 270338 - protein, 15 aa, Artificial Sequence
  Description of Artificial Sequence: Synthetic peptide
  Seed: SIGKVCRTLLAKSVF
SIMKVARPLLGKSVF

SEQ ID NO: 270339 - protein, 15 aa, Artificial Sequence
  Description of Artificial Sequence: Synthetic peptide
  Seed: SIGKVCRTLLAKSVF
SIMKVARPLLHKSVF

SEQ ID NO: 270340 - protein, 15 aa, Artificial Sequence
  Description of Artificial Sequence: Synthetic peptide
  Seed: SIGKVCRTLLAKSVF
SIMKVARPLLQKSVF

SEQ ID NO: 270341 - protein, 15 aa, Artificial Sequence
  Description of Artificial Sequence: Synthetic peptide
  Seed: SIGKVCRTLLAKSVF
SIMKVARPLLRKSVF

SEQ ID NO: 270342 - protein, 15 aa, Artificial Sequence
  Description of Artificial Sequence: Synthetic peptide
  Seed: SIGKVCRTLLAKSVF
SIMKVARPLLSKSVF

SEQ ID NO: 270343 - protein, 15 aa, Artificial Sequence
  Description of Artificial Sequence: Synthetic peptide
  Seed: SIGKVCRTLLAKSVF
SIMKVARPLLTKSVF

SEQ ID NO: 270344 - protein, 15 aa, Artificial Sequence
  Description of Artificial Sequence: Synthetic peptide
  Seed: SIGKVCRTLLAKSVF
SIMKVARPLLYKSVF

SEQ ID NO: 270345 - protein, 15 aa, Artificial Sequence
  Description of Artificial Sequence: Synthetic peptide
  Seed: SIGKVCRTLLAKSVF
SIMKVARQLLAKSVF

SEQ ID NO: 270346 - protein, 15 aa, Artificial Sequence
  Description of Artificial Sequence: Synthetic peptide
  Seed: SIGKVCRTLLAKSVF
SIMKVARQLLGKSVF

SEQ ID NO: 270347 - protein, 15 aa, Artificial Sequence
  Description of Artificial Sequence: Synthetic peptide
  Seed: SIGKVCRTLLAKSVF
SIMKVARQLLHKSVF

SEQ ID NO: 270348 - protein, 15 aa, Artificial Sequence
  Description of Artificial Sequence: Synthetic peptide
  Seed: SIGKVCRTLLAKSVF
SIMKVARQLLQKSVF

SEQ ID NO: 270349 - protein, 15 aa, Artificial Sequence
  Description of Artificial Sequence: Synthetic peptide
  Seed: SIGKVCRTLLAKSVF
SIMKVARQLLRKSVF

SEQ ID NO: 270350 - protein, 15 aa, Artificial Sequence
  Description of Artificial Sequence: Synthetic peptide
  Seed: SIGKVCRTLLAKSVF
SIMKVARQLLSKSVF

SEQ ID NO: 270351 - protein, 15 aa, Artificial Sequence
  Description of Artificial Sequence: Synthetic peptide
  Seed: SIGKVCRTLLAKSVF
SIMKVARRLLAKSVF

SEQ ID NO: 270352 - protein, 15 aa, Artificial Sequence
  Description of Artificial Sequence: Synthetic peptide
  Seed: SIGKVCRTLLAKSVF
SIMKVARRLLCKSVF

SEQ ID NO: 270353 - protein, 15 aa, Artificial Sequence
  Description of Artificial Sequence: Synthetic peptide
  Seed: SIGKVCRTLLAKSVF
SIMKVARRLLDKSVF

SEQ ID NO: 270354 - protein, 15 aa, Artificial Sequence
  Description of Artificial Sequence: Synthetic peptide
  Seed: SIGKVCRTLLAKSVF
SIMKVARRLLEKSVF

SEQ ID NO: 270355 - protein, 15 aa, Artificial Sequence
  Description of Artificial Sequence: Synthetic peptide
  Seed: SIGKVCRTLLAKSVF
SIMKVARRLLFKSVF

SEQ ID NO: 270356 - protein, 15 aa, Artificial Sequence
  Description of Artificial Sequence: Synthetic peptide
  Seed: SIGKVCRTLLAKSVF
SIMKVARRLLGKSVF

SEQ ID NO: 270357 - protein, 15 aa, Artificial Sequence
  Description of Artificial Sequence: Synthetic peptide
  Seed: SIGKVCRTLLAKSVF
SIMKVARRLLHKSVF

SEQ ID NO: 270358 - protein, 15 aa, Artificial Sequence
  Description of Artificial Sequence: Synthetic peptide
  Seed: SIGKVCRTLLAKSVF
SIMKVARRLLIKSVF

SEQ ID NO: 270359 - protein, 15 aa, Artificial Sequence
  Description of Artificial Sequence: Synthetic peptide
  Seed: SIGKVCRTLLAKSVF
SIMKVARRLLKKSVF

SEQ ID NO: 270360 - protein, 15 aa, Artificial Sequence
  Description of Artificial Sequence: Synthetic peptide
  Seed: SIGKVCRTLLAKSVF
SIMKVARRLLLKSVF

SEQ ID NO: 270361 - protein, 15 aa, Artificial Sequence
  Description of Artificial Sequence: Synthetic peptide
  Seed: SIGKVCRTLLAKSVF
SIMKVARRLLMKSVF

SEQ ID NO: 270362 - protein, 15 aa, Artificial Sequence
  Description of Artificial Sequence: Synthetic peptide
  Seed: SIGKVCRTLLAKSVF
SIMKVARRLLNKSVF

SEQ ID NO: 270363 - protein, 15 aa, Artificial Sequence
  Description of Artificial Sequence: Synthetic peptide
  Seed: SIGKVCRTLLAKSVF
SIMKVARRLLPKSVF

SEQ ID NO: 270364 - protein, 15 aa, Artificial Sequence
  Description of Artificial Sequence: Synthetic peptide
  Seed: SIGKVCRTLLAKSVF
SIMKVARRLLQKSVF

SEQ ID NO: 270365 - protein, 15 aa, Artificial Sequence
  Description of Artificial Sequence: Synthetic peptide
  Seed: SIGKVCRTLLAKSVF
SIMKVARRLLRKSVF

SEQ ID NO: 270366 - protein, 15 aa, Artificial Sequence
  Description of Artificial Sequence: Synthetic peptide
  Seed: SIGKVCRTLLAKSVF
SIMKVARRLLSKSVF

SEQ ID NO: 270367 - protein, 15 aa, Artificial Sequence
  Description of Artificial Sequence: Synthetic peptide
  Seed: SIGKVCRTLLAKSVF
SIMKVARRLLTKSVF

SEQ ID NO: 270368 - protein, 15 aa, Artificial Sequence
  Description of Artificial Sequence: Synthetic peptide
  Seed: SIGKVCRTLLAKSVF
SIMKVARRLLVKSVF

SEQ ID NO: 270369 - protein, 15 aa, Artificial Sequence
  Description of Artificial Sequence: Synthetic peptide
  Seed: SIGKVCRTLLAKSVF
SIMKVARRLLWKSVF

SEQ ID NO: 270370 - protein, 15 aa, Artificial Sequence
  Description of Artificial Sequence: Synthetic peptide
  Seed: SIGKVCRTLLAKSVF
SIMKVARRLLYKSVF

SEQ ID NO: 270371 - protein, 15 aa, Artificial Sequence
  Description of Artificial Sequence: Synthetic peptide
  Seed: SIGKVCRTLLAKSVF
SIMKVARSLLAKSVF

SEQ ID NO: 270372 - protein, 15 aa, Artificial Sequence
  Description of Artificial Sequence: Synthetic peptide
  Seed: SIGKVCRTLLAKSVF
SIMKVARSLLGKSVF

SEQ ID NO: 270373 - protein, 15 aa, Artificial Sequence
  Description of Artificial Sequence: Synthetic peptide
  Seed: SIGKVCRTLLAKSVF
SIMKVARSLLHKSVF

SEQ ID NO: 270374 - protein, 15 aa, Artificial Sequence
  Description of Artificial Sequence: Synthetic peptide
  Seed: SIGKVCRTLLAKSVF
SIMKVARSLLKKSVF

SEQ ID NO: 270375 - protein, 15 aa, Artificial Sequence
  Description of Artificial Sequence: Synthetic peptide
  Seed: SIGKVCRTLLAKSVF
SIMKVARSLLNKSVF

SEQ ID NO: 270376 - protein, 15 aa, Artificial Sequence
  Description of Artificial Sequence: Synthetic peptide
  Seed: SIGKVCRTLLAKSVF
SIMKVARSLLQKSVF

SEQ ID NO: 270377 - protein, 15 aa, Artificial Sequence
  Description of Artificial Sequence: Synthetic peptide
  Seed: SIGKVCRTLLAKSVF
SIMKVARSLLRKSVF

SEQ ID NO: 270378 - protein, 15 aa, Artificial Sequence
  Description of Artificial Sequence: Synthetic peptide
  Seed: SIGKVCRTLLAKSVF
SIMKVARSLLSKSVF

SEQ ID NO: 270379 - protein, 15 aa, Artificial Sequence
  Description of Artificial Sequence: Synthetic peptide
  Seed: SIGKVCRTLLAKSVF
SIMKVARSLLTKSVF

SEQ ID NO: 270380 - protein, 15 aa, Artificial Sequence
  Description of Artificial Sequence: Synthetic peptide
  Seed: SIGKVCRTLLAKSVF
SIMKVARSLLYKSVF

SEQ ID NO: 270381 - protein, 15 aa, Artificial Sequence
  Description of Artificial Sequence: Synthetic peptide
  Seed: SIGKVCRTLLAKSVF
SIMKVARTLLAKSVF

SEQ ID NO: 270382 - protein, 15 aa, Artificial Sequence
  Description of Artificial Sequence: Synthetic peptide
  Seed: SIGKVCRTLLAKSVF
SIMKVARTLLGKSVF

SEQ ID NO: 270383 - protein, 15 aa, Artificial Sequence
  Description of Artificial Sequence: Synthetic peptide
  Seed: SIGKVCRTLLAKSVF
SIMKVARTLLHKSVF

SEQ ID NO: 270384 - protein, 15 aa, Artificial Sequence
  Description of Artificial Sequence: Synthetic peptide
  Seed: SIGKVCRTLLAKSVF
SIMKVARTLLKKSVF

SEQ ID NO: 270385 - protein, 15 aa, Artificial Sequence
  Description of Artificial Sequence: Synthetic peptide
  Seed: SIGKVCRTLLAKSVF
SIMKVARTLLMKSVF

SEQ ID NO: 270386 - protein, 15 aa, Artificial Sequence
  Description of Artificial Sequence: Synthetic peptide
  Seed: SIGKVCRTLLAKSVF
SIMKVARTLLNKSVF

SEQ ID NO: 270387 - protein, 15 aa, Artificial Sequence
  Description of Artificial Sequence: Synthetic peptide
  Seed: SIGKVCRTLLAKSVF
SIMKVARTLLQKSVF

SEQ ID NO: 270388 - protein, 15 aa, Artificial Sequence
  Description of Artificial Sequence: Synthetic peptide
  Seed: SIGKVCRTLLAKSVF
SIMKVARTLLRKSVF

SEQ ID NO: 270389 - protein, 15 aa, Artificial Sequence
  Description of Artificial Sequence: Synthetic peptide
  Seed: SIGKVCRTLLAKSVF
SIMKVARTLLSKSVF

SEQ ID NO: 270390 - protein, 15 aa, Artificial Sequence
  Description of Artificial Sequence: Synthetic peptide
  Seed: SIGKVCRTLLAKSVF
SIMKVARTLLTKSVF

SEQ ID NO: 270391 - protein, 15 aa, Artificial Sequence
  Description of Artificial Sequence: Synthetic peptide
  Seed: SIGKVCRTLLAKSVF
SIMKVARTLLYKSVF

SEQ ID NO: 270392 - protein, 15 aa, Artificial Sequence
  Description of Artificial Sequence: Synthetic peptide
  Seed: SIGKVCRTLLAKSVF
SIMKVARVLLAKSVF

SEQ ID NO: 270393 - protein, 15 aa, Artificial Sequence
  Description of Artificial Sequence: Synthetic peptide
  Seed: SIGKVCRTLLAKSVF
SIMKVARVLLGKSVF

SEQ ID NO: 270394 - protein, 15 aa, Artificial Sequence
  Description of Artificial Sequence: Synthetic peptide
  Seed: SIGKVCRTLLAKSVF
SIMKVARVLLHKSVF

SEQ ID NO: 270395 - protein, 15 aa, Artificial Sequence
  Description of Artificial Sequence: Synthetic peptide
  Seed: SIGKVCRTLLAKSVF
SIMKVARVLLKKSVF

SEQ ID NO: 270396 - protein, 15 aa, Artificial Sequence
  Description of Artificial Sequence: Synthetic peptide
  Seed: SIGKVCRTLLAKSVF
SIMKVARVLLQKSVF

SEQ ID NO: 270397 - protein, 15 aa, Artificial Sequence
  Description of Artificial Sequence: Synthetic peptide
  Seed: SIGKVCRTLLAKSVF
SIMKVARVLLRKSVF

SEQ ID NO: 270398 - protein, 15 aa, Artificial Sequence
  Description of Artificial Sequence: Synthetic peptide
  Seed: SIGKVCRTLLAKSVF
SIMKVARVLLSKSVF

SEQ ID NO: 270399 - protein, 15 aa, Artificial Sequence
  Description of Artificial Sequence: Synthetic peptide
  Seed: SIGKVCRTLLAKSVF
SIMKVCRALLAKSVF

SEQ ID NO: 270400 - protein, 15 aa, Artificial Sequence
  Description of Artificial Sequence: Synthetic peptide
  Seed: SIGKVCRTLLAKSVF
SIMKVCRALLGKSVF

SEQ ID NO: 270401 - protein, 15 aa, Artificial Sequence
  Description of Artificial Sequence: Synthetic peptide
  Seed: SIGKVCRTLLAKSVF
SIMKVCRALLHKSVF

SEQ ID NO: 270402 - protein, 15 aa, Artificial Sequence
  Description of Artificial Sequence: Synthetic peptide
  Seed: SIGKVCRTLLAKSVF
SIMKVCRALLKKSVF

SEQ ID NO: 270403 - protein, 15 aa, Artificial Sequence
  Description of Artificial Sequence: Synthetic peptide
  Seed: SIGKVCRTLLAKSVF
SIMKVCRALLQKSVF

SEQ ID NO: 270404 - protein, 15 aa, Artificial Sequence
  Description of Artificial Sequence: Synthetic peptide
  Seed: SIGKVCRTLLAKSVF
SIMKVCRALLRKSVF

SEQ ID NO: 270405 - protein, 15 aa, Artificial Sequence
  Description of Artificial Sequence: Synthetic peptide
  Seed: SIGKVCRTLLAKSVF
SIMKVCRALLSKSVF

SEQ ID NO: 270406 - protein, 15 aa, Artificial Sequence
  Description of Artificial Sequence: Synthetic peptide
  Seed: SIGKVCRTLLAKSVF
SIMKVCRGLLKKSVF

SEQ ID NO: 270407 - protein, 15 aa, Artificial Sequence
  Description of Artificial Sequence: Synthetic peptide
  Seed: SIGKVCRTLLAKSVF
SIMKVCRGLLRKSVF

SEQ ID NO: 270408 - protein, 15 aa, Artificial Sequence
  Description of Artificial Sequence: Synthetic peptide
  Seed: SIGKVCRTLLAKSVF
SIMKVCRHLLAKSVF

SEQ ID NO: 270409 - protein, 15 aa, Artificial Sequence
  Description of Artificial Sequence: Synthetic peptide
  Seed: SIGKVCRTLLAKSVF
SIMKVCRHLLGKSVF

SEQ ID NO: 270410 - protein, 15 aa, Artificial Sequence
  Description of Artificial Sequence: Synthetic peptide
  Seed: SIGKVCRTLLAKSVF
SIMKVCRHLLHKSVF

SEQ ID NO: 270411 - protein, 15 aa, Artificial Sequence
  Description of Artificial Sequence: Synthetic peptide
  Seed: SIGKVCRTLLAKSVF
SIMKVCRHLLKKSVF

SEQ ID NO: 270412 - protein, 15 aa, Artificial Sequence
  Description of Artificial Sequence: Synthetic peptide
  Seed: SIGKVCRTLLAKSVF
SIMKVCRHLLQKSVF

SEQ ID NO: 270413 - protein, 15 aa, Artificial Sequence
  Description of Artificial Sequence: Synthetic peptide
  Seed: SIGKVCRTLLAKSVF
SIMKVCRHLLRKSVF

SEQ ID NO: 270414 - protein, 15 aa, Artificial Sequence
  Description of Artificial Sequence: Synthetic peptide
  Seed: SIGKVCRTLLAKSVF
SIMKVCRHLLSKSVF

SEQ ID NO: 270415 - protein, 15 aa, Artificial Sequence
  Description of Artificial Sequence: Synthetic peptide
  Seed: SIGKVCRTLLAKSVF
SIMKVCRILLKKSVF

SEQ ID NO: 270416 - protein, 15 aa, Artificial Sequence
  Description of Artificial Sequence: Synthetic peptide
  Seed: SIGKVCRTLLAKSVF
SIMKVCRILLRKSVF

SEQ ID NO: 270417 - protein, 15 aa, Artificial Sequence
  Description of Artificial Sequence: Synthetic peptide
  Seed: SIGKVCRTLLAKSVF
SIMKVCRKLLAKSVF

SEQ ID NO: 270418 - protein, 15 aa, Artificial Sequence
  Description of Artificial Sequence: Synthetic peptide
  Seed: SIGKVCRTLLAKSVF
SIMKVCRKLLCKSVF

SEQ ID NO: 270419 - protein, 15 aa, Artificial Sequence
  Description of Artificial Sequence: Synthetic peptide
  Seed: SIGKVCRTLLAKSVF
SIMKVCRKLLEKSVF

SEQ ID NO: 270420 - protein, 15 aa, Artificial Sequence
  Description of Artificial Sequence: Synthetic peptide
  Seed: SIGKVCRTLLAKSVF
SIMKVCRKLLFKSVF

SEQ ID NO: 270421 - protein, 15 aa, Artificial Sequence
  Description of Artificial Sequence: Synthetic peptide
  Seed: SIGKVCRTLLAKSVF
SIMKVCRKLLGKSVF

SEQ ID NO: 270422 - protein, 15 aa, Artificial Sequence
  Description of Artificial Sequence: Synthetic peptide
  Seed: SIGKVCRTLLAKSVF
SIMKVCRKLLHKSVF

SEQ ID NO: 270423 - protein, 15 aa, Artificial Sequence
  Description of Artificial Sequence: Synthetic peptide
  Seed: SIGKVCRTLLAKSVF
SIMKVCRKLLIKSVF

SEQ ID NO: 270424 - protein, 15 aa, Artificial Sequence
  Description of Artificial Sequence: Synthetic peptide
  Seed: SIGKVCRTLLAKSVF
SIMKVCRKLLKKSVF

SEQ ID NO: 270425 - protein, 15 aa, Artificial Sequence
  Description of Artificial Sequence: Synthetic peptide
  Seed: SIGKVCRTLLAKSVF
SIMKVCRKLLLKSVF

SEQ ID NO: 270426 - protein, 15 aa, Artificial Sequence
  Description of Artificial Sequence: Synthetic peptide
  Seed: SIGKVCRTLLAKSVF
SIMKVCRKLLMKSVF

SEQ ID NO: 270427 - protein, 15 aa, Artificial Sequence
  Description of Artificial Sequence: Synthetic peptide
  Seed: SIGKVCRTLLAKSVF
SIMKVCRKLLNKSVF

SEQ ID NO: 270428 - protein, 15 aa, Artificial Sequence
  Description of Artificial Sequence: Synthetic peptide
  Seed: SIGKVCRTLLAKSVF
SIMKVCRKLLPKSVF

SEQ ID NO: 270429 - protein, 15 aa, Artificial Sequence
  Description of Artificial Sequence: Synthetic peptide
  Seed: SIGKVCRTLLAKSVF
SIMKVCRKLLQKSVF

SEQ ID NO: 270430 - protein, 15 aa, Artificial Sequence
  Description of Artificial Sequence: Synthetic peptide
  Seed: SIGKVCRTLLAKSVF
SIMKVCRKLLRKSVF

SEQ ID NO: 270431 - protein, 15 aa, Artificial Sequence
  Description of Artificial Sequence: Synthetic peptide
  Seed: SIGKVCRTLLAKSVF
SIMKVCRKLLSKSVF

SEQ ID NO: 270432 - protein, 15 aa, Artificial Sequence
  Description of Artificial Sequence: Synthetic peptide
  Seed: SIGKVCRTLLAKSVF
SIMKVCRKLLTKSVF

SEQ ID NO: 270433 - protein, 15 aa, Artificial Sequence
  Description of Artificial Sequence: Synthetic peptide
  Seed: SIGKVCRTLLAKSVF
SIMKVCRKLLVKSVF

SEQ ID NO: 270434 - protein, 15 aa, Artificial Sequence
  Description of Artificial Sequence: Synthetic peptide
  Seed: SIGKVCRTLLAKSVF
SIMKVCRKLLWKSVF

SEQ ID NO: 270435 - protein, 15 aa, Artificial Sequence
  Description of Artificial Sequence: Synthetic peptide
  Seed: SIGKVCRTLLAKSVF
SIMKVCRKLLYKSVF

SEQ ID NO: 270436 - protein, 15 aa, Artificial Sequence
  Description of Artificial Sequence: Synthetic peptide
  Seed: SIGKVCRTLLAKSVF
SIMKVCRLLLRKSVF

SEQ ID NO: 270437 - protein, 15 aa, Artificial Sequence
  Description of Artificial Sequence: Synthetic peptide
  Seed: SIGKVCRTLLAKSVF
SIMKVCRMLLRKSVF

SEQ ID NO: 270438 - protein, 15 aa, Artificial Sequence
  Description of Artificial Sequence: Synthetic peptide
  Seed: SIGKVCRTLLAKSVF
SIMKVCRNLLAKSVF

SEQ ID NO: 270439 - protein, 15 aa, Artificial Sequence
  Description of Artificial Sequence: Synthetic peptide
  Seed: SIGKVCRTLLAKSVF
SIMKVCRNLLKKSVF

SEQ ID NO: 270440 - protein, 15 aa, Artificial Sequence
  Description of Artificial Sequence: Synthetic peptide
  Seed: SIGKVCRTLLAKSVF
SIMKVCRNLLRKSVF

SEQ ID NO: 270441 - protein, 15 aa, Artificial Sequence
  Description of Artificial Sequence: Synthetic peptide
  Seed: SIGKVCRTLLAKSVF
SIMKVCRNLLSKSVF

SEQ ID NO: 270442 - protein, 15 aa, Artificial Sequence
  Description of Artificial Sequence: Synthetic peptide
  Seed: SIGKVCRTLLAKSVF
SIMKVCRPLLAKSVF

SEQ ID NO: 270443 - protein, 15 aa, Artificial Sequence
  Description of Artificial Sequence: Synthetic peptide
  Seed: SIGKVCRTLLAKSVF
SIMKVCRPLLKKSVF

SEQ ID NO: 270444 - protein, 15 aa, Artificial Sequence
  Description of Artificial Sequence: Synthetic peptide
  Seed: SIGKVCRTLLAKSVF
SIMKVCRPLLRKSVF

SEQ ID NO: 270445 - protein, 15 aa, Artificial Sequence
  Description of Artificial Sequence: Synthetic peptide
  Seed: SIGKVCRTLLAKSVF
SIMKVCRPLLSKSVF

SEQ ID NO: 270446 - protein, 15 aa, Artificial Sequence
  Description of Artificial Sequence: Synthetic peptide
  Seed: SIGKVCRTLLAKSVF
SIMKVCRQLLKKSVF

SEQ ID NO: 270447 - protein, 15 aa, Artificial Sequence
  Description of Artificial Sequence: Synthetic peptide
  Seed: SIGKVCRTLLAKSVF
SIMKVCRQLLRKSVF

SEQ ID NO: 270448 - protein, 15 aa, Artificial Sequence
  Description of Artificial Sequence: Synthetic peptide
  Seed: SIGKVCRTLLAKSVF
SIMKVCRRLLAKSVF

SEQ ID NO: 270449 - protein, 15 aa, Artificial Sequence
  Description of Artificial Sequence: Synthetic peptide
  Seed: SIGKVCRTLLAKSVF
SIMKVCRRLLCKSVF

SEQ ID NO: 270450 - protein, 15 aa, Artificial Sequence
  Description of Artificial Sequence: Synthetic peptide
  Seed: SIGKVCRTLLAKSVF
SIMKVCRRLLDKSVF

SEQ ID NO: 270451 - protein, 15 aa, Artificial Sequence
  Description of Artificial Sequence: Synthetic peptide
  Seed: SIGKVCRTLLAKSVF
SIMKVCRRLLEKSVF

SEQ ID NO: 270452 - protein, 15 aa, Artificial Sequence
  Description of Artificial Sequence: Synthetic peptide
  Seed: SIGKVCRTLLAKSVF
SIMKVCRRLLFKSVF

SEQ ID NO: 270453 - protein, 15 aa, Artificial Sequence
  Description of Artificial Sequence: Synthetic peptide
  Seed: SIGKVCRTLLAKSVF
SIMKVCRRLLGKSVF

SEQ ID NO: 270454 - protein, 15 aa, Artificial Sequence
  Description of Artificial Sequence: Synthetic peptide
  Seed: SIGKVCRTLLAKSVF
SIMKVCRRLLHKSVF

SEQ ID NO: 270455 - protein, 15 aa, Artificial Sequence
  Description of Artificial Sequence: Synthetic peptide
  Seed: SIGKVCRTLLAKSVF
SIMKVCRRLLIKSVF

SEQ ID NO: 270456 - protein, 15 aa, Artificial Sequence
  Description of Artificial Sequence: Synthetic peptide
  Seed: SIGKVCRTLLAKSVF
SIMKVCRRLLKKSVF

SEQ ID NO: 270457 - protein, 15 aa, Artificial Sequence
  Description of Artificial Sequence: Synthetic peptide
  Seed: SIGKVCRTLLAKSVF
SIMKVCRRLLLKSVF

SEQ ID NO: 270458 - protein, 15 aa, Artificial Sequence
  Description of Artificial Sequence: Synthetic peptide
  Seed: SIGKVCRTLLAKSVF
SIMKVCRRLLMKSVF

SEQ ID NO: 270459 - protein, 15 aa, Artificial Sequence
  Description of Artificial Sequence: Synthetic peptide
  Seed: SIGKVCRTLLAKSVF
SIMKVCRRLLNKSVF

SEQ ID NO: 270460 - protein, 15 aa, Artificial Sequence
  Description of Artificial Sequence: Synthetic peptide
  Seed: SIGKVCRTLLAKSVF
SIMKVCRRLLPKSVF

SEQ ID NO: 270461 - protein, 15 aa, Artificial Sequence
  Description of Artificial Sequence: Synthetic peptide
  Seed: SIGKVCRTLLAKSVF
SIMKVCRRLLQKSVF

SEQ ID NO: 270462 - protein, 15 aa, Artificial Sequence
  Description of Artificial Sequence: Synthetic peptide
  Seed: SIGKVCRTLLAKSVF
SIMKVCRRLLRKSVF

SEQ ID NO: 270463 - protein, 15 aa, Artificial Sequence
  Description of Artificial Sequence: Synthetic peptide
  Seed: SIGKVCRTLLAKSVF
SIMKVCRRLLSKSVF

SEQ ID NO: 270464 - protein, 15 aa, Artificial Sequence
  Description of Artificial Sequence: Synthetic peptide
  Seed: SIGKVCRTLLAKSVF
SIMKVCRRLLTKSVF

SEQ ID NO: 270465 - protein, 15 aa, Artificial Sequence
  Description of Artificial Sequence: Synthetic peptide
  Seed: SIGKVCRTLLAKSVF
SIMKVCRRLLVKSVF

SEQ ID NO: 270466 - protein, 15 aa, Artificial Sequence
  Description of Artificial Sequence: Synthetic peptide
  Seed: SIGKVCRTLLAKSVF
SIMKVCRRLLWKSVF

SEQ ID NO: 270467 - protein, 15 aa, Artificial Sequence
  Description of Artificial Sequence: Synthetic peptide
  Seed: SIGKVCRTLLAKSVF
SIMKVCRRLLYKSVF

SEQ ID NO: 270468 - protein, 15 aa, Artificial Sequence
  Description of Artificial Sequence: Synthetic peptide
  Seed: SIGKVCRTLLAKSVF
SIMKVCRSLLAKSVF

SEQ ID NO: 270469 - protein, 15 aa, Artificial Sequence
  Description of Artificial Sequence: Synthetic peptide
  Seed: SIGKVCRTLLAKSVF
SIMKVCRSLLKKSVF

SEQ ID NO: 270470 - protein, 15 aa, Artificial Sequence
  Description of Artificial Sequence: Synthetic peptide
  Seed: SIGKVCRTLLAKSVF
SIMKVCRSLLRKSVF

SEQ ID NO: 270471 - protein, 15 aa, Artificial Sequence
  Description of Artificial Sequence: Synthetic peptide
  Seed: SIGKVCRTLLAKSVF
SIMKVCRSLLSKSVF

SEQ ID NO: 270472 - protein, 15 aa, Artificial Sequence
  Description of Artificial Sequence: Synthetic peptide
  Seed: SIGKVCRTLLAKSVF
SIMKVCRTLLAKSVF

SEQ ID NO: 270473 - protein, 15 aa, Artificial Sequence
  Description of Artificial Sequence: Synthetic peptide
  Seed: SIGKVCRTLLAKSVF
SIMKVCRTLLKKSVF

SEQ ID NO: 270474 - protein, 15 aa, Artificial Sequence
  Description of Artificial Sequence: Synthetic peptide
  Seed: SIGKVCRTLLAKSVF
SIMKVCRTLLRKSVF

SEQ ID NO: 270475 - protein, 15 aa, Artificial Sequence
  Description of Artificial Sequence: Synthetic peptide
  Seed: SIGKVCRTLLAKSVF
SIMKVCRTLLSKSVF

SEQ ID NO: 270476 - protein, 15 aa, Artificial Sequence
  Description of Artificial Sequence: Synthetic peptide
  Seed: SIGKVCRTLLAKSVF
SIMKVCRVLLKKSVF

SEQ ID NO: 270477 - protein, 15 aa, Artificial Sequence
  Description of Artificial Sequence: Synthetic peptide
  Seed: SIGKVCRTLLAKSVF
SIMKVCRVLLRKSVF

SEQ ID NO: 270478 - protein, 15 aa, Artificial Sequence
  Description of Artificial Sequence: Synthetic peptide
  Seed: SIGKVCRTLLAKSVF
SIMKVCRYLLRKSVF

SEQ ID NO: 270479 - protein, 15 aa, Artificial Sequence
  Description of Artificial Sequence: Synthetic peptide
  Seed: SIGKVCRTLLAKSVF
SIMKVDRKLLAKSVF

SEQ ID NO: 270480 - protein, 15 aa, Artificial Sequence
  Description of Artificial Sequence: Synthetic peptide
  Seed: SIGKVCRTLLAKSVF
SIMKVDRKLLSKSVF

SEQ ID NO: 270481 - protein, 15 aa, Artificial Sequence
  Description of Artificial Sequence: Synthetic peptide
  Seed: SIGKVCRTLLAKSVF
SIMKVDRNLLSKSVF

SEQ ID NO: 270482 - protein, 15 aa, Artificial Sequence
  Description of Artificial Sequence: Synthetic peptide
  Seed: SIGKVCRTLLAKSVF
SIMKVDRRLLAKSVF

SEQ ID NO: 270483 - protein, 15 aa, Artificial Sequence
  Description of Artificial Sequence: Synthetic peptide
  Seed: SIGKVCRTLLAKSVF
SIMKVDRRLLGKSVF

SEQ ID NO: 270484 - protein, 15 aa, Artificial Sequence
  Description of Artificial Sequence: Synthetic peptide
  Seed: SIGKVCRTLLAKSVF
SIMKVDRRLLHKSVF

SEQ ID NO: 270485 - protein, 15 aa, Artificial Sequence
  Description of Artificial Sequence: Synthetic peptide
  Seed: SIGKVCRTLLAKSVF
SIMKVDRRLLKKSVF

SEQ ID NO: 270486 - protein, 15 aa, Artificial Sequence
  Description of Artificial Sequence: Synthetic peptide
  Seed: SIGKVCRTLLAKSVF
SIMKVDRRLLMKSVF

SEQ ID NO: 270487 - protein, 15 aa, Artificial Sequence
  Description of Artificial Sequence: Synthetic peptide
  Seed: SIGKVCRTLLAKSVF
SIMKVDRRLLNKSVF

SEQ ID NO: 270488 - protein, 15 aa, Artificial Sequence
  Description of Artificial Sequence: Synthetic peptide
  Seed: SIGKVCRTLLAKSVF
SIMKVDRRLLQKSVF

SEQ ID NO: 270489 - protein, 15 aa, Artificial Sequence
  Description of Artificial Sequence: Synthetic peptide
  Seed: SIGKVCRTLLAKSVF
SIMKVDRRLLRKSVF

SEQ ID NO: 270490 - protein, 15 aa, Artificial Sequence
  Description of Artificial Sequence: Synthetic peptide
  Seed: SIGKVCRTLLAKSVF
SIMKVDRRLLSKSVF

SEQ ID NO: 270491 - protein, 15 aa, Artificial Sequence
  Description of Artificial Sequence: Synthetic peptide
  Seed: SIGKVCRTLLAKSVF
SIMKVDRRLLTKSVF

SEQ ID NO: 270492 - protein, 15 aa, Artificial Sequence
  Description of Artificial Sequence: Synthetic peptide
  Seed: SIGKVCRTLLAKSVF
SIMKVDRRLLVKSVF

SEQ ID NO: 270493 - protein, 15 aa, Artificial Sequence
  Description of Artificial Sequence: Synthetic peptide
  Seed: SIGKVCRTLLAKSVF
SIMKVDRRLLYKSVF

SEQ ID NO: 270494 - protein, 15 aa, Artificial Sequence
  Description of Artificial Sequence: Synthetic peptide
  Seed: SIGKVCRTLLAKSVF
SIMKVDRTLLAKSVF

SEQ ID NO: 270495 - protein, 15 aa, Artificial Sequence
  Description of Artificial Sequence: Synthetic peptide
  Seed: SIGKVCRTLLAKSVF
SIMKVDRTLLSKSVF

SEQ ID NO: 270496 - protein, 15 aa, Artificial Sequence
  Description of Artificial Sequence: Synthetic peptide
  Seed: SIGKVCRTLLAKSVF
SIMKVERALLRKSVF

SEQ ID NO: 270497 - protein, 15 aa, Artificial Sequence
  Description of Artificial Sequence: Synthetic peptide
  Seed: SIGKVCRTLLAKSVF
SIMKVERALLSKSVF

SEQ ID NO: 270498 - protein, 15 aa, Artificial Sequence
  Description of Artificial Sequence: Synthetic peptide
  Seed: SIGKVCRTLLAKSVF
SIMKVERKLLAKSVF

SEQ ID NO: 270499 - protein, 15 aa, Artificial Sequence
  Description of Artificial Sequence: Synthetic peptide
  Seed: SIGKVCRTLLAKSVF
SIMKVERKLLGKSVF

SEQ ID NO: 270500 - protein, 15 aa, Artificial Sequence
  Description of Artificial Sequence: Synthetic peptide
  Seed: SIGKVCRTLLAKSVF
SIMKVERKLLHKSVF

SEQ ID NO: 270501 - protein, 15 aa, Artificial Sequence
  Description of Artificial Sequence: Synthetic peptide
  Seed: SIGKVCRTLLAKSVF
SIMKVERKLLIKSVF

SEQ ID NO: 270502 - protein, 15 aa, Artificial Sequence
  Description of Artificial Sequence: Synthetic peptide
  Seed: SIGKVCRTLLAKSVF
SIMKVERKLLKKSVF

SEQ ID NO: 270503 - protein, 15 aa, Artificial Sequence
  Description of Artificial Sequence: Synthetic peptide
  Seed: SIGKVCRTLLAKSVF
SIMKVERKLLLKSVF

SEQ ID NO: 270504 - protein, 15 aa, Artificial Sequence
  Description of Artificial Sequence: Synthetic peptide
  Seed: SIGKVCRTLLAKSVF
SIMKVERKLLMKSVF

SEQ ID NO: 270505 - protein, 15 aa, Artificial Sequence
  Description of Artificial Sequence: Synthetic peptide
  Seed: SIGKVCRTLLAKSVF
SIMKVERKLLNKSVF

SEQ ID NO: 270506 - protein, 15 aa, Artificial Sequence
  Description of Artificial Sequence: Synthetic peptide
  Seed: SIGKVCRTLLAKSVF
SIMKVERKLLQKSVF

SEQ ID NO: 270507 - protein, 15 aa, Artificial Sequence
  Description of Artificial Sequence: Synthetic peptide
  Seed: SIGKVCRTLLAKSVF
SIMKVERKLLRKSVF

SEQ ID NO: 270508 - protein, 15 aa, Artificial Sequence
  Description of Artificial Sequence: Synthetic peptide
  Seed: SIGKVCRTLLAKSVF
SIMKVERKLLSKSVF

SEQ ID NO: 270509 - protein, 15 aa, Artificial Sequence
  Description of Artificial Sequence: Synthetic peptide
  Seed: SIGKVCRTLLAKSVF
SIMKVERKLLTKSVF

SEQ ID NO: 270510 - protein, 15 aa, Artificial Sequence
  Description of Artificial Sequence: Synthetic peptide
  Seed: SIGKVCRTLLAKSVF
SIMKVERKLLVKSVF

SEQ ID NO: 270511 - protein, 15 aa, Artificial Sequence
  Description of Artificial Sequence: Synthetic peptide
  Seed: SIGKVCRTLLAKSVF
SIMKVERKLLYKSVF

SEQ ID NO: 270512 - protein, 15 aa, Artificial Sequence
  Description of Artificial Sequence: Synthetic peptide
  Seed: SIGKVCRTLLAKSVF
SIMKVERRLLAKSVF

SEQ ID NO: 270513 - protein, 15 aa, Artificial Sequence
  Description of Artificial Sequence: Synthetic peptide
  Seed: SIGKVCRTLLAKSVF
SIMKVERRLLCKSVF

SEQ ID NO: 270514 - protein, 15 aa, Artificial Sequence
  Description of Artificial Sequence: Synthetic peptide
  Seed: SIGKVCRTLLAKSVF
SIMKVERRLLDKSVF

SEQ ID NO: 270515 - protein, 15 aa, Artificial Sequence
  Description of Artificial Sequence: Synthetic peptide
  Seed: SIGKVCRTLLAKSVF
SIMKVERRLLEKSVF

SEQ ID NO: 270516 - protein, 15 aa, Artificial Sequence
  Description of Artificial Sequence: Synthetic peptide
  Seed: SIGKVCRTLLAKSVF
SIMKVERRLLFKSVF

SEQ ID NO: 270517 - protein, 15 aa, Artificial Sequence
  Description of Artificial Sequence: Synthetic peptide
  Seed: SIGKVCRTLLAKSVF
SIMKVERRLLGKSVF

SEQ ID NO: 270518 - protein, 15 aa, Artificial Sequence
  Description of Artificial Sequence: Synthetic peptide
  Seed: SIGKVCRTLLAKSVF
SIMKVERRLLHKSVF

SEQ ID NO: 270519 - protein, 15 aa, Artificial Sequence
  Description of Artificial Sequence: Synthetic peptide
  Seed: SIGKVCRTLLAKSVF
SIMKVERRLLIKSVF

SEQ ID NO: 270520 - protein, 15 aa, Artificial Sequence
  Description of Artificial Sequence: Synthetic peptide
  Seed: SIGKVCRTLLAKSVF
SIMKVERRLLKKSVF

SEQ ID NO: 270521 - protein, 15 aa, Artificial Sequence
  Description of Artificial Sequence: Synthetic peptide
  Seed: SIGKVCRTLLAKSVF
SIMKVERRLLLKSVF

SEQ ID NO: 270522 - protein, 15 aa, Artificial Sequence
  Description of Artificial Sequence: Synthetic peptide
  Seed: SIGKVCRTLLAKSVF
SIMKVERRLLMKSVF

SEQ ID NO: 270523 - protein, 15 aa, Artificial Sequence
  Description of Artificial Sequence: Synthetic peptide
  Seed: SIGKVCRTLLAKSVF
SIMKVERRLLNKSVF

SEQ ID NO: 270524 - protein, 15 aa, Artificial Sequence
  Description of Artificial Sequence: Synthetic peptide
  Seed: SIGKVCRTLLAKSVF
SIMKVERRLLPKSVF

SEQ ID NO: 270525 - protein, 15 aa, Artificial Sequence
  Description of Artificial Sequence: Synthetic peptide
  Seed: SIGKVCRTLLAKSVF
SIMKVERRLLQKSVF

SEQ ID NO: 270526 - protein, 15 aa, Artificial Sequence
  Description of Artificial Sequence: Synthetic peptide
  Seed: SIGKVCRTLLAKSVF
SIMKVERRLLRKSVF

SEQ ID NO: 270527 - protein, 15 aa, Artificial Sequence
  Description of Artificial Sequence: Synthetic peptide
  Seed: SIGKVCRTLLAKSVF
SIMKVERRLLSKSVF

SEQ ID NO: 270528 - protein, 15 aa, Artificial Sequence
  Description of Artificial Sequence: Synthetic peptide
  Seed: SIGKVCRTLLAKSVF
SIMKVERRLLTKSVF

SEQ ID NO: 270529 - protein, 15 aa, Artificial Sequence
  Description of Artificial Sequence: Synthetic peptide
  Seed: SIGKVCRTLLAKSVF
SIMKVERRLLVKSVF

SEQ ID NO: 270530 - protein, 15 aa, Artificial Sequence
  Description of Artificial Sequence: Synthetic peptide
  Seed: SIGKVCRTLLAKSVF
SIMKVERRLLWKSVF

SEQ ID NO: 270531 - protein, 15 aa, Artificial Sequence
  Description of Artificial Sequence: Synthetic peptide
  Seed: SIGKVCRTLLAKSVF
SIMKVERRLLYKSVF

SEQ ID NO: 270532 - protein, 15 aa, Artificial Sequence
  Description of Artificial Sequence: Synthetic peptide
  Seed: SIGKVCRTLLAKSVF
SIMKVERSLLRKSVF

SEQ ID NO: 270533 - protein, 15 aa, Artificial Sequence
  Description of Artificial Sequence: Synthetic peptide
  Seed: SIGKVCRTLLAKSVF
SIMKVFRALLAKSVF

SEQ ID NO: 270534 - protein, 15 aa, Artificial Sequence
  Description of Artificial Sequence: Synthetic peptide
  Seed: SIGKVCRTLLAKSVF
SIMKVFRALLGKSVF

SEQ ID NO: 270535 - protein, 15 aa, Artificial Sequence
  Description of Artificial Sequence: Synthetic peptide
  Seed: SIGKVCRTLLAKSVF
SIMKVFRALLHKSVF

SEQ ID NO: 270536 - protein, 15 aa, Artificial Sequence
  Description of Artificial Sequence: Synthetic peptide
  Seed: SIGKVCRTLLAKSVF
SIMKVFRALLNKSVF

SEQ ID NO: 270537 - protein, 15 aa, Artificial Sequence
  Description of Artificial Sequence: Synthetic peptide
  Seed: SIGKVCRTLLAKSVF
SIMKVFRALLQKSVF

SEQ ID NO: 270538 - protein, 15 aa, Artificial Sequence
  Description of Artificial Sequence: Synthetic peptide
  Seed: SIGKVCRTLLAKSVF
SIMKVFRALLRKSVF

SEQ ID NO: 270539 - protein, 15 aa, Artificial Sequence
  Description of Artificial Sequence: Synthetic peptide
  Seed: SIGKVCRTLLAKSVF
SIMKVFRALLSKSVF

SEQ ID NO: 270540 - protein, 15 aa, Artificial Sequence
  Description of Artificial Sequence: Synthetic peptide
  Seed: SIGKVCRTLLAKSVF
SIMKVFRGLLAKSVF

SEQ ID NO: 270541 - protein, 15 aa, Artificial Sequence
  Description of Artificial Sequence: Synthetic peptide
  Seed: SIGKVCRTLLAKSVF
SIMKVFRGLLGKSVF

SEQ ID NO: 270542 - protein, 15 aa, Artificial Sequence
  Description of Artificial Sequence: Synthetic peptide
  Seed: SIGKVCRTLLAKSVF
SIMKVFRGLLHKSVF

SEQ ID NO: 270543 - protein, 15 aa, Artificial Sequence
  Description of Artificial Sequence: Synthetic peptide
  Seed: SIGKVCRTLLAKSVF
SIMKVFRGLLQKSVF

SEQ ID NO: 270544 - protein, 15 aa, Artificial Sequence
  Description of Artificial Sequence: Synthetic peptide
  Seed: SIGKVCRTLLAKSVF
SIMKVFRGLLSKSVF

SEQ ID NO: 270545 - protein, 15 aa, Artificial Sequence
  Description of Artificial Sequence: Synthetic peptide
  Seed: SIGKVCRTLLAKSVF
SIMKVFRHLLAKSVF

SEQ ID NO: 270546 - protein, 15 aa, Artificial Sequence
  Description of Artificial Sequence: Synthetic peptide
  Seed: SIGKVCRTLLAKSVF
SIMKVFRHLLGKSVF

SEQ ID NO: 270547 - protein, 15 aa, Artificial Sequence
  Description of Artificial Sequence: Synthetic peptide
  Seed: SIGKVCRTLLAKSVF
SIMKVFRHLLHKSVF

SEQ ID NO: 270548 - protein, 15 aa, Artificial Sequence
  Description of Artificial Sequence: Synthetic peptide
  Seed: SIGKVCRTLLAKSVF
SIMKVFRHLLIKSVF

SEQ ID NO: 270549 - protein, 15 aa, Artificial Sequence
  Description of Artificial Sequence: Synthetic peptide
  Seed: SIGKVCRTLLAKSVF
SIMKVFRHLLKKSVF

SEQ ID NO: 270550 - protein, 15 aa, Artificial Sequence
  Description of Artificial Sequence: Synthetic peptide
  Seed: SIGKVCRTLLAKSVF
SIMKVFRHLLMKSVF

SEQ ID NO: 270551 - protein, 15 aa, Artificial Sequence
  Description of Artificial Sequence: Synthetic peptide
  Seed: SIGKVCRTLLAKSVF
SIMKVFRHLLNKSVF

SEQ ID NO: 270552 - protein, 15 aa, Artificial Sequence
  Description of Artificial Sequence: Synthetic peptide
  Seed: SIGKVCRTLLAKSVF
SIMKVFRHLLPKSVF

SEQ ID NO: 270553 - protein, 15 aa, Artificial Sequence
  Description of Artificial Sequence: Synthetic peptide
  Seed: SIGKVCRTLLAKSVF
SIMKVFRHLLQKSVF

SEQ ID NO: 270554 - protein, 15 aa, Artificial Sequence
  Description of Artificial Sequence: Synthetic peptide
  Seed: SIGKVCRTLLAKSVF
SIMKVFRHLLRKSVF

SEQ ID NO: 270555 - protein, 15 aa, Artificial Sequence
  Description of Artificial Sequence: Synthetic peptide
  Seed: SIGKVCRTLLAKSVF
SIMKVFRHLLSKSVF

SEQ ID NO: 270556 - protein, 15 aa, Artificial Sequence
  Description of Artificial Sequence: Synthetic peptide
  Seed: SIGKVCRTLLAKSVF
SIMKVFRHLLTKSVF

SEQ ID NO: 270557 - protein, 15 aa, Artificial Sequence
  Description of Artificial Sequence: Synthetic peptide
  Seed: SIGKVCRTLLAKSVF
SIMKVFRHLLVKSVF

SEQ ID NO: 270558 - protein, 15 aa, Artificial Sequence
  Description of Artificial Sequence: Synthetic peptide
  Seed: SIGKVCRTLLAKSVF
SIMKVFRHLLYKSVF

SEQ ID NO: 270559 - protein, 15 aa, Artificial Sequence
  Description of Artificial Sequence: Synthetic peptide
  Seed: SIGKVCRTLLAKSVF
SIMKVFRKLLAKSVF

SEQ ID NO: 270560 - protein, 15 aa, Artificial Sequence
  Description of Artificial Sequence: Synthetic peptide
  Seed: SIGKVCRTLLAKSVF
SIMKVFRKLLCKSVF

SEQ ID NO: 270561 - protein, 15 aa, Artificial Sequence
  Description of Artificial Sequence: Synthetic peptide
  Seed: SIGKVCRTLLAKSVF
SIMKVFRKLLDKSVF

SEQ ID NO: 270562 - protein, 15 aa, Artificial Sequence
  Description of Artificial Sequence: Synthetic peptide
  Seed: SIGKVCRTLLAKSVF
SIMKVFRKLLEKSVF

SEQ ID NO: 270563 - protein, 15 aa, Artificial Sequence
  Description of Artificial Sequence: Synthetic peptide
  Seed: SIGKVCRTLLAKSVF
SIMKVFRKLLFKSVF

SEQ ID NO: 270564 - protein, 15 aa, Artificial Sequence
  Description of Artificial Sequence: Synthetic peptide
  Seed: SIGKVCRTLLAKSVF
SIMKVFRKLLGKSVF

SEQ ID NO: 270565 - protein, 15 aa, Artificial Sequence
  Description of Artificial Sequence: Synthetic peptide
  Seed: SIGKVCRTLLAKSVF
SIMKVFRKLLHKSVF

SEQ ID NO: 270566 - protein, 15 aa, Artificial Sequence
  Description of Artificial Sequence: Synthetic peptide
  Seed: SIGKVCRTLLAKSVF
SIMKVFRKLLIKSVF

SEQ ID NO: 270567 - protein, 15 aa, Artificial Sequence
  Description of Artificial Sequence: Synthetic peptide
  Seed: SIGKVCRTLLAKSVF
SIMKVFRKLLKKSVF

SEQ ID NO: 270568 - protein, 15 aa, Artificial Sequence
  Description of Artificial Sequence: Synthetic peptide
  Seed: SIGKVCRTLLAKSVF
SIMKVFRKLLLKSVF

SEQ ID NO: 270569 - protein, 15 aa, Artificial Sequence
  Description of Artificial Sequence: Synthetic peptide
  Seed: SIGKVCRTLLAKSVF
SIMKVFRKLLMKSVF

SEQ ID NO: 270570 - protein, 15 aa, Artificial Sequence
  Description of Artificial Sequence: Synthetic peptide
  Seed: SIGKVCRTLLAKSVF
SIMKVFRKLLNKSVF

SEQ ID NO: 270571 - protein, 15 aa, Artificial Sequence
  Description of Artificial Sequence: Synthetic peptide
  Seed: SIGKVCRTLLAKSVF
SIMKVFRKLLPKSVF

SEQ ID NO: 270572 - protein, 15 aa, Artificial Sequence
  Description of Artificial Sequence: Synthetic peptide
  Seed: SIGKVCRTLLAKSVF
SIMKVFRKLLQKSVF

SEQ ID NO: 270573 - protein, 15 aa, Artificial Sequence
  Description of Artificial Sequence: Synthetic peptide
  Seed: SIGKVCRTLLAKSVF
SIMKVFRKLLRKSVF

SEQ ID NO: 270574 - protein, 15 aa, Artificial Sequence
  Description of Artificial Sequence: Synthetic peptide
  Seed: SIGKVCRTLLAKSVF
SIMKVFRKLLSKSVF

SEQ ID NO: 270575 - protein, 15 aa, Artificial Sequence
  Description of Artificial Sequence: Synthetic peptide
  Seed: SIGKVCRTLLAKSVF
SIMKVFRKLLTKSVF

SEQ ID NO: 270576 - protein, 15 aa, Artificial Sequence
  Description of Artificial Sequence: Synthetic peptide
  Seed: SIGKVCRTLLAKSVF
SIMKVFRKLLVKSVF

SEQ ID NO: 270577 - protein, 15 aa, Artificial Sequence
  Description of Artificial Sequence: Synthetic peptide
  Seed: SIGKVCRTLLAKSVF
SIMKVFRKLLWKSVF

SEQ ID NO: 270578 - protein, 15 aa, Artificial Sequence
  Description of Artificial Sequence: Synthetic peptide
  Seed: SIGKVCRTLLAKSVF
SIMKVFRKLLYKSVF

SEQ ID NO: 270579 - protein, 15 aa, Artificial Sequence
  Description of Artificial Sequence: Synthetic peptide
  Seed: SIGKVCRTLLAKSVF
SIMKVFRNLLAKSVF

SEQ ID NO: 270580 - protein, 15 aa, Artificial Sequence
  Description of Artificial Sequence: Synthetic peptide
  Seed: SIGKVCRTLLAKSVF
SIMKVFRNLLGKSVF

SEQ ID NO: 270581 - protein, 15 aa, Artificial Sequence
  Description of Artificial Sequence: Synthetic peptide
  Seed: SIGKVCRTLLAKSVF
SIMKVFRNLLHKSVF

SEQ ID NO: 270582 - protein, 15 aa, Artificial Sequence
  Description of Artificial Sequence: Synthetic peptide
  Seed: SIGKVCRTLLAKSVF
SIMKVFRNLLQKSVF

SEQ ID NO: 270583 - protein, 15 aa, Artificial Sequence
  Description of Artificial Sequence: Synthetic peptide
  Seed: SIGKVCRTLLAKSVF
SIMKVFRNLLSKSVF

SEQ ID NO: 270584 - protein, 15 aa, Artificial Sequence
  Description of Artificial Sequence: Synthetic peptide
  Seed: SIGKVCRTLLAKSVF
SIMKVFRNLLTKSVF

SEQ ID NO: 270585 - protein, 15 aa, Artificial Sequence
  Description of Artificial Sequence: Synthetic peptide
  Seed: SIGKVCRTLLAKSVF
SIMKVFRPLLAKSVF

SEQ ID NO: 270586 - protein, 15 aa, Artificial Sequence
  Description of Artificial Sequence: Synthetic peptide
  Seed: SIGKVCRTLLAKSVF
SIMKVFRPLLGKSVF

SEQ ID NO: 270587 - protein, 15 aa, Artificial Sequence
  Description of Artificial Sequence: Synthetic peptide
  Seed: SIGKVCRTLLAKSVF
SIMKVFRPLLHKSVF

SEQ ID NO: 270588 - protein, 15 aa, Artificial Sequence
  Description of Artificial Sequence: Synthetic peptide
  Seed: SIGKVCRTLLAKSVF
SIMKVFRPLLMKSVF

SEQ ID NO: 270589 - protein, 15 aa, Artificial Sequence
  Description of Artificial Sequence: Synthetic peptide
  Seed: SIGKVCRTLLAKSVF
SIMKVFRPLLNKSVF

SEQ ID NO: 270590 - protein, 15 aa, Artificial Sequence
  Description of Artificial Sequence: Synthetic peptide
  Seed: SIGKVCRTLLAKSVF
SIMKVFRPLLQKSVF

SEQ ID NO: 270591 - protein, 15 aa, Artificial Sequence
  Description of Artificial Sequence: Synthetic peptide
  Seed: SIGKVCRTLLAKSVF
SIMKVFRPLLSKSVF

SEQ ID NO: 270592 - protein, 15 aa, Artificial Sequence
  Description of Artificial Sequence: Synthetic peptide
  Seed: SIGKVCRTLLAKSVF
SIMKVFRPLLTKSVF

SEQ ID NO: 270593 - protein, 15 aa, Artificial Sequence
  Description of Artificial Sequence: Synthetic peptide
  Seed: SIGKVCRTLLAKSVF
SIMKVFRQLLAKSVF

SEQ ID NO: 270594 - protein, 15 aa, Artificial Sequence
  Description of Artificial Sequence: Synthetic peptide
  Seed: SIGKVCRTLLAKSVF
SIMKVFRQLLHKSVF

SEQ ID NO: 270595 - protein, 15 aa, Artificial Sequence
  Description of Artificial Sequence: Synthetic peptide
  Seed: SIGKVCRTLLAKSVF
SIMKVFRQLLSKSVF

SEQ ID NO: 270596 - protein, 15 aa, Artificial Sequence
  Description of Artificial Sequence: Synthetic peptide
  Seed: SIGKVCRTLLAKSVF
SIMKVFRRLLAKSVF

SEQ ID NO: 270597 - protein, 15 aa, Artificial Sequence
  Description of Artificial Sequence: Synthetic peptide
  Seed: SIGKVCRTLLAKSVF
SIMKVFRRLLCKSVF

SEQ ID NO: 270598 - protein, 15 aa, Artificial Sequence
  Description of Artificial Sequence: Synthetic peptide
  Seed: SIGKVCRTLLAKSVF
SIMKVFRRLLDKSVF

SEQ ID NO: 270599 - protein, 15 aa, Artificial Sequence
  Description of Artificial Sequence: Synthetic peptide
  Seed: SIGKVCRTLLAKSVF
SIMKVFRRLLEKSVF

SEQ ID NO: 270600 - protein, 15 aa, Artificial Sequence
  Description of Artificial Sequence: Synthetic peptide
  Seed: SIGKVCRTLLAKSVF
SIMKVFRRLLFKSVF

SEQ ID NO: 270601 - protein, 15 aa, Artificial Sequence
  Description of Artificial Sequence: Synthetic peptide
  Seed: SIGKVCRTLLAKSVF
SIMKVFRRLLGKSVF

SEQ ID NO: 270602 - protein, 15 aa, Artificial Sequence
  Description of Artificial Sequence: Synthetic peptide
  Seed: SIGKVCRTLLAKSVF
SIMKVFRRLLHKSVF

SEQ ID NO: 270603 - protein, 15 aa, Artificial Sequence
  Description of Artificial Sequence: Synthetic peptide
  Seed: SIGKVCRTLLAKSVF
SIMKVFRRLLIKSVF

SEQ ID NO: 270604 - protein, 15 aa, Artificial Sequence
  Description of Artificial Sequence: Synthetic peptide
  Seed: SIGKVCRTLLAKSVF
SIMKVFRRLLKKSVF

SEQ ID NO: 270605 - protein, 15 aa, Artificial Sequence
  Description of Artificial Sequence: Synthetic peptide
  Seed: SIGKVCRTLLAKSVF
SIMKVFRRLLLKSVF

SEQ ID NO: 270606 - protein, 15 aa, Artificial Sequence
  Description of Artificial Sequence: Synthetic peptide
  Seed: SIGKVCRTLLAKSVF
SIMKVFRRLLMKSVF

SEQ ID NO: 270607 - protein, 15 aa, Artificial Sequence
  Description of Artificial Sequence: Synthetic peptide
  Seed: SIGKVCRTLLAKSVF
SIMKVFRRLLNKSVF

SEQ ID NO: 270608 - protein, 15 aa, Artificial Sequence
  Description of Artificial Sequence: Synthetic peptide
  Seed: SIGKVCRTLLAKSVF
SIMKVFRRLLPKSVF

SEQ ID NO: 270609 - protein, 15 aa, Artificial Sequence
  Description of Artificial Sequence: Synthetic peptide
  Seed: SIGKVCRTLLAKSVF
SIMKVFRRLLQKSVF

SEQ ID NO: 270610 - protein, 15 aa, Artificial Sequence
  Description of Artificial Sequence: Synthetic peptide
  Seed: SIGKVCRTLLAKSVF
SIMKVFRRLLRKSVF

SEQ ID NO: 270611 - protein, 15 aa, Artificial Sequence
  Description of Artificial Sequence: Synthetic peptide
  Seed: SIGKVCRTLLAKSVF
SIMKVFRRLLSKSVF

SEQ ID NO: 270612 - protein, 15 aa, Artificial Sequence
  Description of Artificial Sequence: Synthetic peptide
  Seed: SIGKVCRTLLAKSVF
SIMKVFRRLLTKSVF

SEQ ID NO: 270613 - protein, 15 aa, Artificial Sequence
  Description of Artificial Sequence: Synthetic peptide
  Seed: SIGKVCRTLLAKSVF
SIMKVFRRLLVKSVF

SEQ ID NO: 270614 - protein, 15 aa, Artificial Sequence
  Description of Artificial Sequence: Synthetic peptide
  Seed: SIGKVCRTLLAKSVF
SIMKVFRRLLWKSVF

SEQ ID NO: 270615 - protein, 15 aa, Artificial Sequence
  Description of Artificial Sequence: Synthetic peptide
  Seed: SIGKVCRTLLAKSVF
SIMKVFRRLLYKSVF

SEQ ID NO: 270616 - protein, 15 aa, Artificial Sequence
  Description of Artificial Sequence: Synthetic peptide
  Seed: SIGKVCRTLLAKSVF
SIMKVFRSLLAKSVF

SEQ ID NO: 270617 - protein, 15 aa, Artificial Sequence
  Description of Artificial Sequence: Synthetic peptide
  Seed: SIGKVCRTLLAKSVF
SIMKVFRSLLDKSVF

SEQ ID NO: 270618 - protein, 15 aa, Artificial Sequence
  Description of Artificial Sequence: Synthetic peptide
  Seed: SIGKVCRTLLAKSVF
SIMKVFRSLLGKSVF

SEQ ID NO: 270619 - protein, 15 aa, Artificial Sequence
  Description of Artificial Sequence: Synthetic peptide
  Seed: SIGKVCRTLLAKSVF
SIMKVFRSLLHKSVF

SEQ ID NO: 270620 - protein, 15 aa, Artificial Sequence
  Description of Artificial Sequence: Synthetic peptide
  Seed: SIGKVCRTLLAKSVF
SIMKVFRSLLNKSVF

SEQ ID NO: 270621 - protein, 15 aa, Artificial Sequence
  Description of Artificial Sequence: Synthetic peptide
  Seed: SIGKVCRTLLAKSVF
SIMKVFRSLLQKSVF

SEQ ID NO: 270622 - protein, 15 aa, Artificial Sequence
  Description of Artificial Sequence: Synthetic peptide
  Seed: SIGKVCRTLLAKSVF
SIMKVFRSLLSKSVF

SEQ ID NO: 270623 - protein, 15 aa, Artificial Sequence
  Description of Artificial Sequence: Synthetic peptide
  Seed: SIGKVCRTLLAKSVF
SIMKVFRSLLTKSVF

SEQ ID NO: 270624 - protein, 15 aa, Artificial Sequence
  Description of Artificial Sequence: Synthetic peptide
  Seed: SIGKVCRTLLAKSVF
SIMKVFRTLLAKSVF

SEQ ID NO: 270625 - protein, 15 aa, Artificial Sequence
  Description of Artificial Sequence: Synthetic peptide
  Seed: SIGKVCRTLLAKSVF
SIMKVFRTLLDKSVF

SEQ ID NO: 270626 - protein, 15 aa, Artificial Sequence
  Description of Artificial Sequence: Synthetic peptide
  Seed: SIGKVCRTLLAKSVF
SIMKVFRTLLEKSVF

SEQ ID NO: 270627 - protein, 15 aa, Artificial Sequence
  Description of Artificial Sequence: Synthetic peptide
  Seed: SIGKVCRTLLAKSVF
SIMKVFRTLLGKSVF

SEQ ID NO: 270628 - protein, 15 aa, Artificial Sequence
  Description of Artificial Sequence: Synthetic peptide
  Seed: SIGKVCRTLLAKSVF
SIMKVFRTLLHKSVF

SEQ ID NO: 270629 - protein, 15 aa, Artificial Sequence
  Description of Artificial Sequence: Synthetic peptide
  Seed: SIGKVCRTLLAKSVF
SIMKVFRTLLKKSVF

SEQ ID NO: 270630 - protein, 15 aa, Artificial Sequence
  Description of Artificial Sequence: Synthetic peptide
  Seed: SIGKVCRTLLAKSVF
SIMKVFRTLLQKSVF

SEQ ID NO: 270631 - protein, 15 aa, Artificial Sequence
  Description of Artificial Sequence: Synthetic peptide
  Seed: SIGKVCRTLLAKSVF
SIMKVFRTLLRKSVF

SEQ ID NO: 270632 - protein, 15 aa, Artificial Sequence
  Description of Artificial Sequence: Synthetic peptide
  Seed: SIGKVCRTLLAKSVF
SIMKVFRTLLSKSVF

SEQ ID NO: 270633 - protein, 15 aa, Artificial Sequence
  Description of Artificial Sequence: Synthetic peptide
  Seed: SIGKVCRTLLAKSVF
SIMKVFRTLLTKSVF

SEQ ID NO: 270634 - protein, 15 aa, Artificial Sequence
  Description of Artificial Sequence: Synthetic peptide
  Seed: SIGKVCRTLLAKSVF
SIMKVGRHLLAKSVF

SEQ ID NO: 270635 - protein, 15 aa, Artificial Sequence
  Description of Artificial Sequence: Synthetic peptide
  Seed: SIGKVCRTLLAKSVF
SIMKVGRHLLQKSVF

SEQ ID NO: 270636 - protein, 15 aa, Artificial Sequence
  Description of Artificial Sequence: Synthetic peptide
  Seed: SIGKVCRTLLAKSVF
SIMKVGRHLLSKSVF

SEQ ID NO: 270637 - protein, 15 aa, Artificial Sequence
  Description of Artificial Sequence: Synthetic peptide
  Seed: SIGKVCRTLLAKSVF
SIMKVGRKLLAKSVF

SEQ ID NO: 270638 - protein, 15 aa, Artificial Sequence
  Description of Artificial Sequence: Synthetic peptide
  Seed: SIGKVCRTLLAKSVF
SIMKVGRKLLEKSVF

SEQ ID NO: 270639 - protein, 15 aa, Artificial Sequence
  Description of Artificial Sequence: Synthetic peptide
  Seed: SIGKVCRTLLAKSVF
SIMKVGRKLLFKSVF

SEQ ID NO: 270640 - protein, 15 aa, Artificial Sequence
  Description of Artificial Sequence: Synthetic peptide
  Seed: SIGKVCRTLLAKSVF
SIMKVGRKLLGKSVF

SEQ ID NO: 270641 - protein, 15 aa, Artificial Sequence
  Description of Artificial Sequence: Synthetic peptide
  Seed: SIGKVCRTLLAKSVF
SIMKVGRKLLHKSVF

SEQ ID NO: 270642 - protein, 15 aa, Artificial Sequence
  Description of Artificial Sequence: Synthetic peptide
  Seed: SIGKVCRTLLAKSVF
SIMKVGRKLLIKSVF

SEQ ID NO: 270643 - protein, 15 aa, Artificial Sequence
  Description of Artificial Sequence: Synthetic peptide
  Seed: SIGKVCRTLLAKSVF
SIMKVGRKLLKKSVF

SEQ ID NO: 270644 - protein, 15 aa, Artificial Sequence
  Description of Artificial Sequence: Synthetic peptide
  Seed: SIGKVCRTLLAKSVF
SIMKVGRKLLLKSVF

SEQ ID NO: 270645 - protein, 15 aa, Artificial Sequence
  Description of Artificial Sequence: Synthetic peptide
  Seed: SIGKVCRTLLAKSVF
SIMKVGRKLLMKSVF

SEQ ID NO: 270646 - protein, 15 aa, Artificial Sequence
  Description of Artificial Sequence: Synthetic peptide
  Seed: SIGKVCRTLLAKSVF
SIMKVGRKLLNKSVF

SEQ ID NO: 270647 - protein, 15 aa, Artificial Sequence
  Description of Artificial Sequence: Synthetic peptide
  Seed: SIGKVCRTLLAKSVF
SIMKVGRKLLPKSVF

SEQ ID NO: 270648 - protein, 15 aa, Artificial Sequence
  Description of Artificial Sequence: Synthetic peptide
  Seed: SIGKVCRTLLAKSVF
SIMKVGRKLLQKSVF

SEQ ID NO: 270649 - protein, 15 aa, Artificial Sequence
  Description of Artificial Sequence: Synthetic peptide
  Seed: SIGKVCRTLLAKSVF
SIMKVGRKLLRKSVF

SEQ ID NO: 270650 - protein, 15 aa, Artificial Sequence
  Description of Artificial Sequence: Synthetic peptide
  Seed: SIGKVCRTLLAKSVF
SIMKVGRKLLSKSVF

SEQ ID NO: 270651 - protein, 15 aa, Artificial Sequence
  Description of Artificial Sequence: Synthetic peptide
  Seed: SIGKVCRTLLAKSVF
SIMKVGRKLLTKSVF

SEQ ID NO: 270652 - protein, 15 aa, Artificial Sequence
  Description of Artificial Sequence: Synthetic peptide
  Seed: SIGKVCRTLLAKSVF
SIMKVGRKLLVKSVF

SEQ ID NO: 270653 - protein, 15 aa, Artificial Sequence
  Description of Artificial Sequence: Synthetic peptide
  Seed: SIGKVCRTLLAKSVF
SIMKVGRKLLYKSVF

SEQ ID NO: 270654 - protein, 15 aa, Artificial Sequence
  Description of Artificial Sequence: Synthetic peptide
  Seed: SIGKVCRTLLAKSVF
SIMKVGRRLLAKSVF

SEQ ID NO: 270655 - protein, 15 aa, Artificial Sequence
  Description of Artificial Sequence: Synthetic peptide
  Seed: SIGKVCRTLLAKSVF
SIMKVGRRLLCKSVF

SEQ ID NO: 270656 - protein, 15 aa, Artificial Sequence
  Description of Artificial Sequence: Synthetic peptide
  Seed: SIGKVCRTLLAKSVF
SIMKVGRRLLDKSVF

SEQ ID NO: 270657 - protein, 15 aa, Artificial Sequence
  Description of Artificial Sequence: Synthetic peptide
  Seed: SIGKVCRTLLAKSVF
SIMKVGRRLLEKSVF

SEQ ID NO: 270658 - protein, 15 aa, Artificial Sequence
  Description of Artificial Sequence: Synthetic peptide
  Seed: SIGKVCRTLLAKSVF
SIMKVGRRLLFKSVF

SEQ ID NO: 270659 - protein, 15 aa, Artificial Sequence
  Description of Artificial Sequence: Synthetic peptide
  Seed: SIGKVCRTLLAKSVF
SIMKVGRRLLGKSVF

SEQ ID NO: 270660 - protein, 15 aa, Artificial Sequence
  Description of Artificial Sequence: Synthetic peptide
  Seed: SIGKVCRTLLAKSVF
SIMKVGRRLLHKSVF

SEQ ID NO: 270661 - protein, 15 aa, Artificial Sequence
  Description of Artificial Sequence: Synthetic peptide
  Seed: SIGKVCRTLLAKSVF
SIMKVGRRLLIKSVF

SEQ ID NO: 270662 - protein, 15 aa, Artificial Sequence
  Description of Artificial Sequence: Synthetic peptide
  Seed: SIGKVCRTLLAKSVF
SIMKVGRRLLKKSVF

SEQ ID NO: 270663 - protein, 15 aa, Artificial Sequence
  Description of Artificial Sequence: Synthetic peptide
  Seed: SIGKVCRTLLAKSVF
SIMKVGRRLLLKSVF

SEQ ID NO: 270664 - protein, 15 aa, Artificial Sequence
  Description of Artificial Sequence: Synthetic peptide
  Seed: SIGKVCRTLLAKSVF
SIMKVGRRLLMKSVF

SEQ ID NO: 270665 - protein, 15 aa, Artificial Sequence
  Description of Artificial Sequence: Synthetic peptide
  Seed: SIGKVCRTLLAKSVF
SIMKVGRRLLNKSVF

SEQ ID NO: 270666 - protein, 15 aa, Artificial Sequence
  Description of Artificial Sequence: Synthetic peptide
  Seed: SIGKVCRTLLAKSVF
SIMKVGRRLLPKSVF

SEQ ID NO: 270667 - protein, 15 aa, Artificial Sequence
  Description of Artificial Sequence: Synthetic peptide
  Seed: SIGKVCRTLLAKSVF
SIMKVGRRLLQKSVF

SEQ ID NO: 270668 - protein, 15 aa, Artificial Sequence
  Description of Artificial Sequence: Synthetic peptide
  Seed: SIGKVCRTLLAKSVF
SIMKVGRRLLRKSVF

SEQ ID NO: 270669 - protein, 15 aa, Artificial Sequence
  Description of Artificial Sequence: Synthetic peptide
  Seed: SIGKVCRTLLAKSVF
SIMKVGRRLLSKSVF

SEQ ID NO: 270670 - protein, 15 aa, Artificial Sequence
  Description of Artificial Sequence: Synthetic peptide
  Seed: SIGKVCRTLLAKSVF
SIMKVGRRLLTKSVF

SEQ ID NO: 270671 - protein, 15 aa, Artificial Sequence
  Description of Artificial Sequence: Synthetic peptide
  Seed: SIGKVCRTLLAKSVF
SIMKVGRRLLVKSVF

SEQ ID NO: 270672 - protein, 15 aa, Artificial Sequence
  Description of Artificial Sequence: Synthetic peptide
  Seed: SIGKVCRTLLAKSVF
SIMKVGRRLLYKSVF

SEQ ID NO: 270673 - protein, 15 aa, Artificial Sequence
  Description of Artificial Sequence: Synthetic peptide
  Seed: SIGKVCRTLLAKSVF
SIMKVHRALLAKSVF

SEQ ID NO: 270674 - protein, 15 aa, Artificial Sequence
  Description of Artificial Sequence: Synthetic peptide
  Seed: SIGKVCRTLLAKSVF
SIMKVHRALLGKSVF

SEQ ID NO: 270675 - protein, 15 aa, Artificial Sequence
  Description of Artificial Sequence: Synthetic peptide
  Seed: SIGKVCRTLLAKSVF
SIMKVHRALLQKSVF

SEQ ID NO: 270676 - protein, 15 aa, Artificial Sequence
  Description of Artificial Sequence: Synthetic peptide
  Seed: SIGKVCRTLLAKSVF
SIMKVHRALLRKSVF

SEQ ID NO: 270677 - protein, 15 aa, Artificial Sequence
  Description of Artificial Sequence: Synthetic peptide
  Seed: SIGKVCRTLLAKSVF
SIMKVHRALLSKSVF

SEQ ID NO: 270678 - protein, 15 aa, Artificial Sequence
  Description of Artificial Sequence: Synthetic peptide
  Seed: SIGKVCRTLLAKSVF
SIMKVHRALLYKSVF

SEQ ID NO: 270679 - protein, 15 aa, Artificial Sequence
  Description of Artificial Sequence: Synthetic peptide
  Seed: SIGKVCRTLLAKSVF
SIMKVHRCLLRKSVF

SEQ ID NO: 270680 - protein, 15 aa, Artificial Sequence
  Description of Artificial Sequence: Synthetic peptide
  Seed: SIGKVCRTLLAKSVF
SIMKVHRGLLAKSVF

SEQ ID NO: 270681 - protein, 15 aa, Artificial Sequence
  Description of Artificial Sequence: Synthetic peptide
  Seed: SIGKVCRTLLAKSVF
SIMKVHRGLLGKSVF

SEQ ID NO: 270682 - protein, 15 aa, Artificial Sequence
  Description of Artificial Sequence: Synthetic peptide
  Seed: SIGKVCRTLLAKSVF
SIMKVHRGLLQKSVF

SEQ ID NO: 270683 - protein, 15 aa, Artificial Sequence
  Description of Artificial Sequence: Synthetic peptide
  Seed: SIGKVCRTLLAKSVF
SIMKVHRGLLRKSVF

SEQ ID NO: 270684 - protein, 15 aa, Artificial Sequence
  Description of Artificial Sequence: Synthetic peptide
  Seed: SIGKVCRTLLAKSVF
SIMKVHRHLLAKSVF

SEQ ID NO: 270685 - protein, 15 aa, Artificial Sequence
  Description of Artificial Sequence: Synthetic peptide
  Seed: SIGKVCRTLLAKSVF
SIMKVHRHLLGKSVF

SEQ ID NO: 270686 - protein, 15 aa, Artificial Sequence
  Description of Artificial Sequence: Synthetic peptide
  Seed: SIGKVCRTLLAKSVF
SIMKVHRHLLMKSVF

SEQ ID NO: 270687 - protein, 15 aa, Artificial Sequence
  Description of Artificial Sequence: Synthetic peptide
  Seed: SIGKVCRTLLAKSVF
SIMKVHRHLLQKSVF

SEQ ID NO: 270688 - protein, 15 aa, Artificial Sequence
  Description of Artificial Sequence: Synthetic peptide
  Seed: SIGKVCRTLLAKSVF
SIMKVHRHLLSKSVF

SEQ ID NO: 270689 - protein, 15 aa, Artificial Sequence
  Description of Artificial Sequence: Synthetic peptide
  Seed: SIGKVCRTLLAKSVF
SIMKVHRHLLYKSVF

SEQ ID NO: 270690 - protein, 15 aa, Artificial Sequence
  Description of Artificial Sequence: Synthetic peptide
  Seed: SIGKVCRTLLAKSVF
SIMKVHRILLAKSVF

SEQ ID NO: 270691 - protein, 15 aa, Artificial Sequence
  Description of Artificial Sequence: Synthetic peptide
  Seed: SIGKVCRTLLAKSVF
SIMKVHRILLGKSVF

SEQ ID NO: 270692 - protein, 15 aa, Artificial Sequence
  Description of Artificial Sequence: Synthetic peptide
  Seed: SIGKVCRTLLAKSVF
SIMKVHRILLQKSVF

SEQ ID NO: 270693 - protein, 15 aa, Artificial Sequence
  Description of Artificial Sequence: Synthetic peptide
  Seed: SIGKVCRTLLAKSVF
SIMKVHRILLRKSVF

SEQ ID NO: 270694 - protein, 15 aa, Artificial Sequence
  Description of Artificial Sequence: Synthetic peptide
  Seed: SIGKVCRTLLAKSVF
SIMKVHRILLSKSVF

SEQ ID NO: 270695 - protein, 15 aa, Artificial Sequence
  Description of Artificial Sequence: Synthetic peptide
  Seed: SIGKVCRTLLAKSVF
SIMKVHRKLLAKSVF

SEQ ID NO: 270696 - protein, 15 aa, Artificial Sequence
  Description of Artificial Sequence: Synthetic peptide
  Seed: SIGKVCRTLLAKSVF
SIMKVHRKLLCKSVF

SEQ ID NO: 270697 - protein, 15 aa, Artificial Sequence
  Description of Artificial Sequence: Synthetic peptide
  Seed: SIGKVCRTLLAKSVF
SIMKVHRKLLDKSVF

SEQ ID NO: 270698 - protein, 15 aa, Artificial Sequence
  Description of Artificial Sequence: Synthetic peptide
  Seed: SIGKVCRTLLAKSVF
SIMKVHRKLLEKSVF

SEQ ID NO: 270699 - protein, 15 aa, Artificial Sequence
  Description of Artificial Sequence: Synthetic peptide
  Seed: SIGKVCRTLLAKSVF
SIMKVHRKLLFKSVF

SEQ ID NO: 270700 - protein, 15 aa, Artificial Sequence
  Description of Artificial Sequence: Synthetic peptide
  Seed: SIGKVCRTLLAKSVF
SIMKVHRKLLGKSVF

SEQ ID NO: 270701 - protein, 15 aa, Artificial Sequence
  Description of Artificial Sequence: Synthetic peptide
  Seed: SIGKVCRTLLAKSVF
SIMKVHRKLLHKSVF

SEQ ID NO: 270702 - protein, 15 aa, Artificial Sequence
  Description of Artificial Sequence: Synthetic peptide
  Seed: SIGKVCRTLLAKSVF
SIMKVHRKLLIKSVF

SEQ ID NO: 270703 - protein, 15 aa, Artificial Sequence
  Description of Artificial Sequence: Synthetic peptide
  Seed: SIGKVCRTLLAKSVF
SIMKVHRKLLKKSVF

SEQ ID NO: 270704 - protein, 15 aa, Artificial Sequence
  Description of Artificial Sequence: Synthetic peptide
  Seed: SIGKVCRTLLAKSVF
SIMKVHRKLLLKSVF

SEQ ID NO: 270705 - protein, 15 aa, Artificial Sequence
  Description of Artificial Sequence: Synthetic peptide
  Seed: SIGKVCRTLLAKSVF
SIMKVHRKLLMKSVF

SEQ ID NO: 270706 - protein, 15 aa, Artificial Sequence
  Description of Artificial Sequence: Synthetic peptide
  Seed: SIGKVCRTLLAKSVF
SIMKVHRKLLNKSVF

SEQ ID NO: 270707 - protein, 15 aa, Artificial Sequence
  Description of Artificial Sequence: Synthetic peptide
  Seed: SIGKVCRTLLAKSVF
SIMKVHRKLLPKSVF

SEQ ID NO: 270708 - protein, 15 aa, Artificial Sequence
  Description of Artificial Sequence: Synthetic peptide
  Seed: SIGKVCRTLLAKSVF
SIMKVHRKLLQKSVF

SEQ ID NO: 270709 - protein, 15 aa, Artificial Sequence
  Description of Artificial Sequence: Synthetic peptide
  Seed: SIGKVCRTLLAKSVF
SIMKVHRKLLRKSVF

SEQ ID NO: 270710 - protein, 15 aa, Artificial Sequence
  Description of Artificial Sequence: Synthetic peptide
  Seed: SIGKVCRTLLAKSVF
SIMKVHRKLLSKSVF

SEQ ID NO: 270711 - protein, 15 aa, Artificial Sequence
  Description of Artificial Sequence: Synthetic peptide
  Seed: SIGKVCRTLLAKSVF
SIMKVHRKLLTKSVF

SEQ ID NO: 270712 - protein, 15 aa, Artificial Sequence
  Description of Artificial Sequence: Synthetic peptide
  Seed: SIGKVCRTLLAKSVF
SIMKVHRKLLVKSVF

SEQ ID NO: 270713 - protein, 15 aa, Artificial Sequence
  Description of Artificial Sequence: Synthetic peptide
  Seed: SIGKVCRTLLAKSVF
SIMKVHRKLLWKSVF

SEQ ID NO: 270714 - protein, 15 aa, Artificial Sequence
  Description of Artificial Sequence: Synthetic peptide
  Seed: SIGKVCRTLLAKSVF
SIMKVHRKLLYKSVF

SEQ ID NO: 270715 - protein, 15 aa, Artificial Sequence
  Description of Artificial Sequence: Synthetic peptide
  Seed: SIGKVCRTLLAKSVF
SIMKVHRMLLRKSVF

SEQ ID NO: 270716 - protein, 15 aa, Artificial Sequence
  Description of Artificial Sequence: Synthetic peptide
  Seed: SIGKVCRTLLAKSVF
SIMKVHRNLLAKSVF

SEQ ID NO: 270717 - protein, 15 aa, Artificial Sequence
  Description of Artificial Sequence: Synthetic peptide
  Seed: SIGKVCRTLLAKSVF
SIMKVHRNLLGKSVF

SEQ ID NO: 270718 - protein, 15 aa, Artificial Sequence
  Description of Artificial Sequence: Synthetic peptide
  Seed: SIGKVCRTLLAKSVF
SIMKVHRNLLHKSVF

SEQ ID NO: 270719 - protein, 15 aa, Artificial Sequence
  Description of Artificial Sequence: Synthetic peptide
  Seed: SIGKVCRTLLAKSVF
SIMKVHRNLLMKSVF

SEQ ID NO: 270720 - protein, 15 aa, Artificial Sequence
  Description of Artificial Sequence: Synthetic peptide
  Seed: SIGKVCRTLLAKSVF
SIMKVHRNLLQKSVF

SEQ ID NO: 270721 - protein, 15 aa, Artificial Sequence
  Description of Artificial Sequence: Synthetic peptide
  Seed: SIGKVCRTLLAKSVF
SIMKVHRNLLRKSVF

SEQ ID NO: 270722 - protein, 15 aa, Artificial Sequence
  Description of Artificial Sequence: Synthetic peptide
  Seed: SIGKVCRTLLAKSVF
SIMKVHRNLLSKSVF

SEQ ID NO: 270723 - protein, 15 aa, Artificial Sequence
  Description of Artificial Sequence: Synthetic peptide
  Seed: SIGKVCRTLLAKSVF
SIMKVHRNLLYKSVF

SEQ ID NO: 270724 - protein, 15 aa, Artificial Sequence
  Description of Artificial Sequence: Synthetic peptide
  Seed: SIGKVCRTLLAKSVF
SIMKVHRPLLAKSVF

SEQ ID NO: 270725 - protein, 15 aa, Artificial Sequence
  Description of Artificial Sequence: Synthetic peptide
  Seed: SIGKVCRTLLAKSVF
SIMKVHRPLLQKSVF

SEQ ID NO: 270726 - protein, 15 aa, Artificial Sequence
  Description of Artificial Sequence: Synthetic peptide
  Seed: SIGKVCRTLLAKSVF
SIMKVHRPLLRKSVF

SEQ ID NO: 270727 - protein, 15 aa, Artificial Sequence
  Description of Artificial Sequence: Synthetic peptide
  Seed: SIGKVCRTLLAKSVF
SIMKVHRPLLSKSVF

SEQ ID NO: 270728 - protein, 15 aa, Artificial Sequence
  Description of Artificial Sequence: Synthetic peptide
  Seed: SIGKVCRTLLAKSVF
SIMKVHRQLLAKSVF

SEQ ID NO: 270729 - protein, 15 aa, Artificial Sequence
  Description of Artificial Sequence: Synthetic peptide
  Seed: SIGKVCRTLLAKSVF
SIMKVHRQLLGKSVF

SEQ ID NO: 270730 - protein, 15 aa, Artificial Sequence
  Description of Artificial Sequence: Synthetic peptide
  Seed: SIGKVCRTLLAKSVF
SIMKVHRQLLQKSVF

SEQ ID NO: 270731 - protein, 15 aa, Artificial Sequence
  Description of Artificial Sequence: Synthetic peptide
  Seed: SIGKVCRTLLAKSVF
SIMKVHRQLLRKSVF

SEQ ID NO: 270732 - protein, 15 aa, Artificial Sequence
  Description of Artificial Sequence: Synthetic peptide
  Seed: SIGKVCRTLLAKSVF
SIMKVHRQLLSKSVF

SEQ ID NO: 270733 - protein, 15 aa, Artificial Sequence
  Description of Artificial Sequence: Synthetic peptide
  Seed: SIGKVCRTLLAKSVF
SIMKVHRRLLAKSVF

SEQ ID NO: 270734 - protein, 15 aa, Artificial Sequence
  Description of Artificial Sequence: Synthetic peptide
  Seed: SIGKVCRTLLAKSVF
SIMKVHRRLLCKSVF

SEQ ID NO: 270735 - protein, 15 aa, Artificial Sequence
  Description of Artificial Sequence: Synthetic peptide
  Seed: SIGKVCRTLLAKSVF
SIMKVHRRLLDKSVF

SEQ ID NO: 270736 - protein, 15 aa, Artificial Sequence
  Description of Artificial Sequence: Synthetic peptide
  Seed: SIGKVCRTLLAKSVF
SIMKVHRRLLEKSVF

SEQ ID NO: 270737 - protein, 15 aa, Artificial Sequence
  Description of Artificial Sequence: Synthetic peptide
  Seed: SIGKVCRTLLAKSVF
SIMKVHRRLLFKSVF

SEQ ID NO: 270738 - protein, 15 aa, Artificial Sequence
  Description of Artificial Sequence: Synthetic peptide
  Seed: SIGKVCRTLLAKSVF
SIMKVHRRLLGKSVF

SEQ ID NO: 270739 - protein, 15 aa, Artificial Sequence
  Description of Artificial Sequence: Synthetic peptide
  Seed: SIGKVCRTLLAKSVF
SIMKVHRRLLHKSVF

SEQ ID NO: 270740 - protein, 15 aa, Artificial Sequence
  Description of Artificial Sequence: Synthetic peptide
  Seed: SIGKVCRTLLAKSVF
SIMKVHRRLLIKSVF

SEQ ID NO: 270741 - protein, 15 aa, Artificial Sequence
  Description of Artificial Sequence: Synthetic peptide
  Seed: SIGKVCRTLLAKSVF
SIMKVHRRLLKKSVF

SEQ ID NO: 270742 - protein, 15 aa, Artificial Sequence
  Description of Artificial Sequence: Synthetic peptide
  Seed: SIGKVCRTLLAKSVF
SIMKVHRRLLLKSVF

SEQ ID NO: 270743 - protein, 15 aa, Artificial Sequence
  Description of Artificial Sequence: Synthetic peptide
  Seed: SIGKVCRTLLAKSVF
SIMKVHRRLLMKSVF

SEQ ID NO: 270744 - protein, 15 aa, Artificial Sequence
  Description of Artificial Sequence: Synthetic peptide
  Seed: SIGKVCRTLLAKSVF
SIMKVHRRLLNKSVF

SEQ ID NO: 270745 - protein, 15 aa, Artificial Sequence
  Description of Artificial Sequence: Synthetic peptide
  Seed: SIGKVCRTLLAKSVF
SIMKVHRRLLPKSVF

SEQ ID NO: 270746 - protein, 15 aa, Artificial Sequence
  Description of Artificial Sequence: Synthetic peptide
  Seed: SIGKVCRTLLAKSVF
SIMKVHRRLLQKSVF

SEQ ID NO: 270747 - protein, 15 aa, Artificial Sequence
  Description of Artificial Sequence: Synthetic peptide
  Seed: SIGKVCRTLLAKSVF
SIMKVHRRLLRKSVF

SEQ ID NO: 270748 - protein, 15 aa, Artificial Sequence
  Description of Artificial Sequence: Synthetic peptide
  Seed: SIGKVCRTLLAKSVF
SIMKVHRRLLSKSVF

SEQ ID NO: 270749 - protein, 15 aa, Artificial Sequence
  Description of Artificial Sequence: Synthetic peptide
  Seed: SIGKVCRTLLAKSVF
SIMKVHRRLLTKSVF

SEQ ID NO: 270750 - protein, 15 aa, Artificial Sequence
  Description of Artificial Sequence: Synthetic peptide
  Seed: SIGKVCRTLLAKSVF
SIMKVHRRLLVKSVF

SEQ ID NO: 270751 - protein, 15 aa, Artificial Sequence
  Description of Artificial Sequence: Synthetic peptide
  Seed: SIGKVCRTLLAKSVF
SIMKVHRRLLWKSVF

SEQ ID NO: 270752 - protein, 15 aa, Artificial Sequence
  Description of Artificial Sequence: Synthetic peptide
  Seed: SIGKVCRTLLAKSVF
SIMKVHRRLLYKSVF

SEQ ID NO: 270753 - protein, 15 aa, Artificial Sequence
  Description of Artificial Sequence: Synthetic peptide
  Seed: SIGKVCRTLLAKSVF
SIMKVHRSLLAKSVF

SEQ ID NO: 270754 - protein, 15 aa, Artificial Sequence
  Description of Artificial Sequence: Synthetic peptide
  Seed: SIGKVCRTLLAKSVF
SIMKVHRSLLGKSVF

SEQ ID NO: 270755 - protein, 15 aa, Artificial Sequence
  Description of Artificial Sequence: Synthetic peptide
  Seed: SIGKVCRTLLAKSVF
SIMKVHRSLLHKSVF

SEQ ID NO: 270756 - protein, 15 aa, Artificial Sequence
  Description of Artificial Sequence: Synthetic peptide
  Seed: SIGKVCRTLLAKSVF
SIMKVHRSLLKKSVF

SEQ ID NO: 270757 - protein, 15 aa, Artificial Sequence
  Description of Artificial Sequence: Synthetic peptide
  Seed: SIGKVCRTLLAKSVF
SIMKVHRSLLLKSVF

SEQ ID NO: 270758 - protein, 15 aa, Artificial Sequence
  Description of Artificial Sequence: Synthetic peptide
  Seed: SIGKVCRTLLAKSVF
SIMKVHRSLLMKSVF

SEQ ID NO: 270759 - protein, 15 aa, Artificial Sequence
  Description of Artificial Sequence: Synthetic peptide
  Seed: SIGKVCRTLLAKSVF
SIMKVHRSLLQKSVF

SEQ ID NO: 270760 - protein, 15 aa, Artificial Sequence
  Description of Artificial Sequence: Synthetic peptide
  Seed: SIGKVCRTLLAKSVF
SIMKVHRSLLRKSVF

SEQ ID NO: 270761 - protein, 15 aa, Artificial Sequence
  Description of Artificial Sequence: Synthetic peptide
  Seed: SIGKVCRTLLAKSVF
SIMKVHRSLLSKSVF

SEQ ID NO: 270762 - protein, 15 aa, Artificial Sequence
  Description of Artificial Sequence: Synthetic peptide
  Seed: SIGKVCRTLLAKSVF
SIMKVHRSLLVKSVF

SEQ ID NO: 270763 - protein, 15 aa, Artificial Sequence
  Description of Artificial Sequence: Synthetic peptide
  Seed: SIGKVCRTLLAKSVF
SIMKVHRSLLYKSVF

SEQ ID NO: 270764 - protein, 15 aa, Artificial Sequence
  Description of Artificial Sequence: Synthetic peptide
  Seed: SIGKVCRTLLAKSVF
SIMKVHRTLLAKSVF

SEQ ID NO: 270765 - protein, 15 aa, Artificial Sequence
  Description of Artificial Sequence: Synthetic peptide
  Seed: SIGKVCRTLLAKSVF
SIMKVHRTLLGKSVF

SEQ ID NO: 270766 - protein, 15 aa, Artificial Sequence
  Description of Artificial Sequence: Synthetic peptide
  Seed: SIGKVCRTLLAKSVF
SIMKVHRTLLHKSVF

SEQ ID NO: 270767 - protein, 15 aa, Artificial Sequence
  Description of Artificial Sequence: Synthetic peptide
  Seed: SIGKVCRTLLAKSVF
SIMKVHRTLLKKSVF

SEQ ID NO: 270768 - protein, 15 aa, Artificial Sequence
  Description of Artificial Sequence: Synthetic peptide
  Seed: SIGKVCRTLLAKSVF
SIMKVHRTLLMKSVF

SEQ ID NO: 270769 - protein, 15 aa, Artificial Sequence
  Description of Artificial Sequence: Synthetic peptide
  Seed: SIGKVCRTLLAKSVF
SIMKVHRTLLQKSVF

SEQ ID NO: 270770 - protein, 15 aa, Artificial Sequence
  Description of Artificial Sequence: Synthetic peptide
  Seed: SIGKVCRTLLAKSVF
SIMKVHRTLLRKSVF

SEQ ID NO: 270771 - protein, 15 aa, Artificial Sequence
  Description of Artificial Sequence: Synthetic peptide
  Seed: SIGKVCRTLLAKSVF
SIMKVHRTLLSKSVF

SEQ ID NO: 270772 - protein, 15 aa, Artificial Sequence
  Description of Artificial Sequence: Synthetic peptide
  Seed: SIGKVCRTLLAKSVF
SIMKVHRTLLTKSVF

SEQ ID NO: 270773 - protein, 15 aa, Artificial Sequence
  Description of Artificial Sequence: Synthetic peptide
  Seed: SIGKVCRTLLAKSVF
SIMKVHRTLLVKSVF

SEQ ID NO: 270774 - protein, 15 aa, Artificial Sequence
  Description of Artificial Sequence: Synthetic peptide
  Seed: SIGKVCRTLLAKSVF
SIMKVHRTLLYKSVF

SEQ ID NO: 270775 - protein, 15 aa, Artificial Sequence
  Description of Artificial Sequence: Synthetic peptide
  Seed: SIGKVCRTLLAKSVF
SIMKVHRVLLAKSVF

SEQ ID NO: 270776 - protein, 15 aa, Artificial Sequence
  Description of Artificial Sequence: Synthetic peptide
  Seed: SIGKVCRTLLAKSVF
SIMKVHRVLLGKSVF

SEQ ID NO: 270777 - protein, 15 aa, Artificial Sequence
  Description of Artificial Sequence: Synthetic peptide
  Seed: SIGKVCRTLLAKSVF
SIMKVHRVLLHKSVF

SEQ ID NO: 270778 - protein, 15 aa, Artificial Sequence
  Description of Artificial Sequence: Synthetic peptide
  Seed: SIGKVCRTLLAKSVF
SIMKVHRVLLKKSVF

SEQ ID NO: 270779 - protein, 15 aa, Artificial Sequence
  Description of Artificial Sequence: Synthetic peptide
  Seed: SIGKVCRTLLAKSVF
SIMKVHRVLLQKSVF

SEQ ID NO: 270780 - protein, 15 aa, Artificial Sequence
  Description of Artificial Sequence: Synthetic peptide
  Seed: SIGKVCRTLLAKSVF
SIMKVHRVLLRKSVF

SEQ ID NO: 270781 - protein, 15 aa, Artificial Sequence
  Description of Artificial Sequence: Synthetic peptide
  Seed: SIGKVCRTLLAKSVF
SIMKVHRVLLSKSVF

SEQ ID NO: 270782 - protein, 15 aa, Artificial Sequence
  Description of Artificial Sequence: Synthetic peptide
  Seed: SIGKVCRTLLAKSVF
SIMKVIRALLAKSVF

SEQ ID NO: 270783 - protein, 15 aa, Artificial Sequence
  Description of Artificial Sequence: Synthetic peptide
  Seed: SIGKVCRTLLAKSVF
SIMKVIRALLGKSVF

SEQ ID NO: 270784 - protein, 15 aa, Artificial Sequence
  Description of Artificial Sequence: Synthetic peptide
  Seed: SIGKVCRTLLAKSVF
SIMKVIRALLHKSVF

SEQ ID NO: 270785 - protein, 15 aa, Artificial Sequence
  Description of Artificial Sequence: Synthetic peptide
  Seed: SIGKVCRTLLAKSVF
SIMKVIRALLMKSVF

SEQ ID NO: 270786 - protein, 15 aa, Artificial Sequence
  Description of Artificial Sequence: Synthetic peptide
  Seed: SIGKVCRTLLAKSVF
SIMKVIRALLNKSVF

SEQ ID NO: 270787 - protein, 15 aa, Artificial Sequence
  Description of Artificial Sequence: Synthetic peptide
  Seed: SIGKVCRTLLAKSVF
SIMKVIRALLQKSVF

SEQ ID NO: 270788 - protein, 15 aa, Artificial Sequence
  Description of Artificial Sequence: Synthetic peptide
  Seed: SIGKVCRTLLAKSVF
SIMKVIRALLSKSVF

SEQ ID NO: 270789 - protein, 15 aa, Artificial Sequence
  Description of Artificial Sequence: Synthetic peptide
  Seed: SIGKVCRTLLAKSVF
SIMKVIRALLVKSVF

SEQ ID NO: 270790 - protein, 15 aa, Artificial Sequence
  Description of Artificial Sequence: Synthetic peptide
  Seed: SIGKVCRTLLAKSVF
SIMKVIRALLYKSVF

SEQ ID NO: 270791 - protein, 15 aa, Artificial Sequence
  Description of Artificial Sequence: Synthetic peptide
  Seed: SIGKVCRTLLAKSVF
SIMKVIRGLLAKSVF

SEQ ID NO: 270792 - protein, 15 aa, Artificial Sequence
  Description of Artificial Sequence: Synthetic peptide
  Seed: SIGKVCRTLLAKSVF
SIMKVIRGLLGKSVF

SEQ ID NO: 270793 - protein, 15 aa, Artificial Sequence
  Description of Artificial Sequence: Synthetic peptide
  Seed: SIGKVCRTLLAKSVF
SIMKVIRGLLIKSVF

SEQ ID NO: 270794 - protein, 15 aa, Artificial Sequence
  Description of Artificial Sequence: Synthetic peptide
  Seed: SIGKVCRTLLAKSVF
SIMKVIRGLLMKSVF

SEQ ID NO: 270795 - protein, 15 aa, Artificial Sequence
  Description of Artificial Sequence: Synthetic peptide
  Seed: SIGKVCRTLLAKSVF
SIMKVIRGLLNKSVF

SEQ ID NO: 270796 - protein, 15 aa, Artificial Sequence
  Description of Artificial Sequence: Synthetic peptide
  Seed: SIGKVCRTLLAKSVF
SIMKVIRGLLQKSVF

SEQ ID NO: 270797 - protein, 15 aa, Artificial Sequence
  Description of Artificial Sequence: Synthetic peptide
  Seed: SIGKVCRTLLAKSVF
SIMKVIRGLLSKSVF

SEQ ID NO: 270798 - protein, 15 aa, Artificial Sequence
  Description of Artificial Sequence: Synthetic peptide
  Seed: SIGKVCRTLLAKSVF
SIMKVIRGLLVKSVF

SEQ ID NO: 270799 - protein, 15 aa, Artificial Sequence
  Description of Artificial Sequence: Synthetic peptide
  Seed: SIGKVCRTLLAKSVF
SIMKVIRGLLYKSVF

SEQ ID NO: 270800 - protein, 15 aa, Artificial Sequence
  Description of Artificial Sequence: Synthetic peptide
  Seed: SIGKVCRTLLAKSVF
SIMKVIRHLLAKSVF

SEQ ID NO: 270801 - protein, 15 aa, Artificial Sequence
  Description of Artificial Sequence: Synthetic peptide
  Seed: SIGKVCRTLLAKSVF
SIMKVIRHLLEKSVF

SEQ ID NO: 270802 - protein, 15 aa, Artificial Sequence
  Description of Artificial Sequence: Synthetic peptide
  Seed: SIGKVCRTLLAKSVF
SIMKVIRHLLGKSVF

SEQ ID NO: 270803 - protein, 15 aa, Artificial Sequence
  Description of Artificial Sequence: Synthetic peptide
  Seed: SIGKVCRTLLAKSVF
SIMKVIRHLLHKSVF

SEQ ID NO: 270804 - protein, 15 aa, Artificial Sequence
  Description of Artificial Sequence: Synthetic peptide
  Seed: SIGKVCRTLLAKSVF
SIMKVIRHLLIKSVF

SEQ ID NO: 270805 - protein, 15 aa, Artificial Sequence
  Description of Artificial Sequence: Synthetic peptide
  Seed: SIGKVCRTLLAKSVF
SIMKVIRHLLLKSVF

SEQ ID NO: 270806 - protein, 15 aa, Artificial Sequence
  Description of Artificial Sequence: Synthetic peptide
  Seed: SIGKVCRTLLAKSVF
SIMKVIRHLLMKSVF

SEQ ID NO: 270807 - protein, 15 aa, Artificial Sequence
  Description of Artificial Sequence: Synthetic peptide
  Seed: SIGKVCRTLLAKSVF
SIMKVIRHLLNKSVF

SEQ ID NO: 270808 - protein, 15 aa, Artificial Sequence
  Description of Artificial Sequence: Synthetic peptide
  Seed: SIGKVCRTLLAKSVF
SIMKVIRHLLPKSVF

SEQ ID NO: 270809 - protein, 15 aa, Artificial Sequence
  Description of Artificial Sequence: Synthetic peptide
  Seed: SIGKVCRTLLAKSVF
SIMKVIRHLLQKSVF

SEQ ID NO: 270810 - protein, 15 aa, Artificial Sequence
  Description of Artificial Sequence: Synthetic peptide
  Seed: SIGKVCRTLLAKSVF
SIMKVIRHLLSKSVF

SEQ ID NO: 270811 - protein, 15 aa, Artificial Sequence
  Description of Artificial Sequence: Synthetic peptide
  Seed: SIGKVCRTLLAKSVF
SIMKVIRHLLTKSVF

SEQ ID NO: 270812 - protein, 15 aa, Artificial Sequence
  Description of Artificial Sequence: Synthetic peptide
  Seed: SIGKVCRTLLAKSVF
SIMKVIRHLLVKSVF

SEQ ID NO: 270813 - protein, 15 aa, Artificial Sequence
  Description of Artificial Sequence: Synthetic peptide
  Seed: SIGKVCRTLLAKSVF
SIMKVIRHLLYKSVF

SEQ ID NO: 270814 - protein, 15 aa, Artificial Sequence
  Description of Artificial Sequence: Synthetic peptide
  Seed: SIGKVCRTLLAKSVF
SIMKVIRILLGKSVF

SEQ ID NO: 270815 - protein, 15 aa, Artificial Sequence
  Description of Artificial Sequence: Synthetic peptide
  Seed: SIGKVCRTLLAKSVF
SIMKVIRILLQKSVF

SEQ ID NO: 270816 - protein, 15 aa, Artificial Sequence
  Description of Artificial Sequence: Synthetic peptide
  Seed: SIGKVCRTLLAKSVF
SIMKVIRKLLAKSVF

SEQ ID NO: 270817 - protein, 15 aa, Artificial Sequence
  Description of Artificial Sequence: Synthetic peptide
  Seed: SIGKVCRTLLAKSVF
SIMKVIRKLLCKSVF

SEQ ID NO: 270818 - protein, 15 aa, Artificial Sequence
  Description of Artificial Sequence: Synthetic peptide
  Seed: SIGKVCRTLLAKSVF
SIMKVIRKLLDKSVF

SEQ ID NO: 270819 - protein, 15 aa, Artificial Sequence
  Description of Artificial Sequence: Synthetic peptide
  Seed: SIGKVCRTLLAKSVF
SIMKVIRKLLEKSVF

SEQ ID NO: 270820 - protein, 15 aa, Artificial Sequence
  Description of Artificial Sequence: Synthetic peptide
  Seed: SIGKVCRTLLAKSVF
SIMKVIRKLLFKSVF

SEQ ID NO: 270821 - protein, 15 aa, Artificial Sequence
  Description of Artificial Sequence: Synthetic peptide
  Seed: SIGKVCRTLLAKSVF
SIMKVIRKLLGKSVF

SEQ ID NO: 270822 - protein, 15 aa, Artificial Sequence
  Description of Artificial Sequence: Synthetic peptide
  Seed: SIGKVCRTLLAKSVF
SIMKVIRKLLHKSVF

SEQ ID NO: 270823 - protein, 15 aa, Artificial Sequence
  Description of Artificial Sequence: Synthetic peptide
  Seed: SIGKVCRTLLAKSVF
SIMKVIRKLLIKSVF

SEQ ID NO: 270824 - protein, 15 aa, Artificial Sequence
  Description of Artificial Sequence: Synthetic peptide
  Seed: SIGKVCRTLLAKSVF
SIMKVIRKLLKKSVF

SEQ ID NO: 270825 - protein, 15 aa, Artificial Sequence
  Description of Artificial Sequence: Synthetic peptide
  Seed: SIGKVCRTLLAKSVF
SIMKVIRKLLLKSVF

SEQ ID NO: 270826 - protein, 15 aa, Artificial Sequence
  Description of Artificial Sequence: Synthetic peptide
  Seed: SIGKVCRTLLAKSVF
SIMKVIRKLLMKSVF

SEQ ID NO: 270827 - protein, 15 aa, Artificial Sequence
  Description of Artificial Sequence: Synthetic peptide
  Seed: SIGKVCRTLLAKSVF
SIMKVIRKLLNKSVF

SEQ ID NO: 270828 - protein, 15 aa, Artificial Sequence
  Description of Artificial Sequence: Synthetic peptide
  Seed: SIGKVCRTLLAKSVF
SIMKVIRKLLPKSVF

SEQ ID NO: 270829 - protein, 15 aa, Artificial Sequence
  Description of Artificial Sequence: Synthetic peptide
  Seed: SIGKVCRTLLAKSVF
SIMKVIRKLLQKSVF

SEQ ID NO: 270830 - protein, 15 aa, Artificial Sequence
  Description of Artificial Sequence: Synthetic peptide
  Seed: SIGKVCRTLLAKSVF
SIMKVIRKLLRKSVF

SEQ ID NO: 270831 - protein, 15 aa, Artificial Sequence
  Description of Artificial Sequence: Synthetic peptide
  Seed: SIGKVCRTLLAKSVF
SIMKVIRKLLSKSVF

SEQ ID NO: 270832 - protein, 15 aa, Artificial Sequence
  Description of Artificial Sequence: Synthetic peptide
  Seed: SIGKVCRTLLAKSVF
SIMKVIRKLLTKSVF

SEQ ID NO: 270833 - protein, 15 aa, Artificial Sequence
  Description of Artificial Sequence: Synthetic peptide
  Seed: SIGKVCRTLLAKSVF
SIMKVIRKLLVKSVF

SEQ ID NO: 270834 - protein, 15 aa, Artificial Sequence
  Description of Artificial Sequence: Synthetic peptide
  Seed: SIGKVCRTLLAKSVF
SIMKVIRKLLWKSVF

SEQ ID NO: 270835 - protein, 15 aa, Artificial Sequence
  Description of Artificial Sequence: Synthetic peptide
  Seed: SIGKVCRTLLAKSVF
SIMKVIRKLLYKSVF

SEQ ID NO: 270836 - protein, 15 aa, Artificial Sequence
  Description of Artificial Sequence: Synthetic peptide
  Seed: SIGKVCRTLLAKSVF
SIMKVIRNLLAKSVF

SEQ ID NO: 270837 - protein, 15 aa, Artificial Sequence
  Description of Artificial Sequence: Synthetic peptide
  Seed: SIGKVCRTLLAKSVF
SIMKVIRNLLDKSVF

SEQ ID NO: 270838 - protein, 15 aa, Artificial Sequence
  Description of Artificial Sequence: Synthetic peptide
  Seed: SIGKVCRTLLAKSVF
SIMKVIRNLLEKSVF

SEQ ID NO: 270839 - protein, 15 aa, Artificial Sequence
  Description of Artificial Sequence: Synthetic peptide
  Seed: SIGKVCRTLLAKSVF
SIMKVIRNLLGKSVF

SEQ ID NO: 270840 - protein, 15 aa, Artificial Sequence
  Description of Artificial Sequence: Synthetic peptide
  Seed: SIGKVCRTLLAKSVF
SIMKVIRNLLHKSVF

SEQ ID NO: 270841 - protein, 15 aa, Artificial Sequence
  Description of Artificial Sequence: Synthetic peptide
  Seed: SIGKVCRTLLAKSVF
SIMKVIRNLLIKSVF

SEQ ID NO: 270842 - protein, 15 aa, Artificial Sequence
  Description of Artificial Sequence: Synthetic peptide
  Seed: SIGKVCRTLLAKSVF
SIMKVIRNLLMKSVF

SEQ ID NO: 270843 - protein, 15 aa, Artificial Sequence
  Description of Artificial Sequence: Synthetic peptide
  Seed: SIGKVCRTLLAKSVF
SIMKVIRNLLNKSVF

SEQ ID NO: 270844 - protein, 15 aa, Artificial Sequence
  Description of Artificial Sequence: Synthetic peptide
  Seed: SIGKVCRTLLAKSVF
SIMKVIRNLLPKSVF

SEQ ID NO: 270845 - protein, 15 aa, Artificial Sequence
  Description of Artificial Sequence: Synthetic peptide
  Seed: SIGKVCRTLLAKSVF
SIMKVIRNLLQKSVF

SEQ ID NO: 270846 - protein, 15 aa, Artificial Sequence
  Description of Artificial Sequence: Synthetic peptide
  Seed: SIGKVCRTLLAKSVF
SIMKVIRNLLSKSVF

SEQ ID NO: 270847 - protein, 15 aa, Artificial Sequence
  Description of Artificial Sequence: Synthetic peptide
  Seed: SIGKVCRTLLAKSVF
SIMKVIRNLLTKSVF

SEQ ID NO: 270848 - protein, 15 aa, Artificial Sequence
  Description of Artificial Sequence: Synthetic peptide
  Seed: SIGKVCRTLLAKSVF
SIMKVIRNLLVKSVF

SEQ ID NO: 270849 - protein, 15 aa, Artificial Sequence
  Description of Artificial Sequence: Synthetic peptide
  Seed: SIGKVCRTLLAKSVF
SIMKVIRNLLYKSVF

SEQ ID NO: 270850 - protein, 15 aa, Artificial Sequence
  Description of Artificial Sequence: Synthetic peptide
  Seed: SIGKVCRTLLAKSVF
SIMKVIRPLLAKSVF

SEQ ID NO: 270851 - protein, 15 aa, Artificial Sequence
  Description of Artificial Sequence: Synthetic peptide
  Seed: SIGKVCRTLLAKSVF
SIMKVIRPLLGKSVF

SEQ ID NO: 270852 - protein, 15 aa, Artificial Sequence
  Description of Artificial Sequence: Synthetic peptide
  Seed: SIGKVCRTLLAKSVF
SIMKVIRPLLIKSVF

SEQ ID NO: 270853 - protein, 15 aa, Artificial Sequence
  Description of Artificial Sequence: Synthetic peptide
  Seed: SIGKVCRTLLAKSVF
SIMKVIRPLLLKSVF

SEQ ID NO: 270854 - protein, 15 aa, Artificial Sequence
  Description of Artificial Sequence: Synthetic peptide
  Seed: SIGKVCRTLLAKSVF
SIMKVIRPLLMKSVF

SEQ ID NO: 270855 - protein, 15 aa, Artificial Sequence
  Description of Artificial Sequence: Synthetic peptide
  Seed: SIGKVCRTLLAKSVF
SIMKVIRPLLQKSVF

SEQ ID NO: 270856 - protein, 15 aa, Artificial Sequence
  Description of Artificial Sequence: Synthetic peptide
  Seed: SIGKVCRTLLAKSVF
SIMKVIRPLLSKSVF

SEQ ID NO: 270857 - protein, 15 aa, Artificial Sequence
  Description of Artificial Sequence: Synthetic peptide
  Seed: SIGKVCRTLLAKSVF
SIMKVIRPLLVKSVF

SEQ ID NO: 270858 - protein, 15 aa, Artificial Sequence
  Description of Artificial Sequence: Synthetic peptide
  Seed: SIGKVCRTLLAKSVF
SIMKVIRPLLYKSVF

SEQ ID NO: 270859 - protein, 15 aa, Artificial Sequence
  Description of Artificial Sequence: Synthetic peptide
  Seed: SIGKVCRTLLAKSVF
SIMKVIRQLLAKSVF

SEQ ID NO: 270860 - protein, 15 aa, Artificial Sequence
  Description of Artificial Sequence: Synthetic peptide
  Seed: SIGKVCRTLLAKSVF
SIMKVIRQLLGKSVF

SEQ ID NO: 270861 - protein, 15 aa, Artificial Sequence
  Description of Artificial Sequence: Synthetic peptide
  Seed: SIGKVCRTLLAKSVF
SIMKVIRQLLHKSVF

SEQ ID NO: 270862 - protein, 15 aa, Artificial Sequence
  Description of Artificial Sequence: Synthetic peptide
  Seed: SIGKVCRTLLAKSVF
SIMKVIRQLLNKSVF

SEQ ID NO: 270863 - protein, 15 aa, Artificial Sequence
  Description of Artificial Sequence: Synthetic peptide
  Seed: SIGKVCRTLLAKSVF
SIMKVIRQLLQKSVF

SEQ ID NO: 270864 - protein, 15 aa, Artificial Sequence
  Description of Artificial Sequence: Synthetic peptide
  Seed: SIGKVCRTLLAKSVF
SIMKVIRQLLSKSVF

SEQ ID NO: 270865 - protein, 15 aa, Artificial Sequence
  Description of Artificial Sequence: Synthetic peptide
  Seed: SIGKVCRTLLAKSVF
SIMKVIRQLLTKSVF

SEQ ID NO: 270866 - protein, 15 aa, Artificial Sequence
  Description of Artificial Sequence: Synthetic peptide
  Seed: SIGKVCRTLLAKSVF
SIMKVIRRLLAKSVF

SEQ ID NO: 270867 - protein, 15 aa, Artificial Sequence
  Description of Artificial Sequence: Synthetic peptide
  Seed: SIGKVCRTLLAKSVF
SIMKVIRRLLCKSVF

SEQ ID NO: 270868 - protein, 15 aa, Artificial Sequence
  Description of Artificial Sequence: Synthetic peptide
  Seed: SIGKVCRTLLAKSVF
SIMKVIRRLLDKSVF

SEQ ID NO: 270869 - protein, 15 aa, Artificial Sequence
  Description of Artificial Sequence: Synthetic peptide
  Seed: SIGKVCRTLLAKSVF
SIMKVIRRLLEKSVF

SEQ ID NO: 270870 - protein, 15 aa, Artificial Sequence
  Description of Artificial Sequence: Synthetic peptide
  Seed: SIGKVCRTLLAKSVF
SIMKVIRRLLFKSVF

SEQ ID NO: 270871 - protein, 15 aa, Artificial Sequence
  Description of Artificial Sequence: Synthetic peptide
  Seed: SIGKVCRTLLAKSVF
SIMKVIRRLLGKSVF

SEQ ID NO: 270872 - protein, 15 aa, Artificial Sequence
  Description of Artificial Sequence: Synthetic peptide
  Seed: SIGKVCRTLLAKSVF
SIMKVIRRLLHKSVF

SEQ ID NO: 270873 - protein, 15 aa, Artificial Sequence
  Description of Artificial Sequence: Synthetic peptide
  Seed: SIGKVCRTLLAKSVF
SIMKVIRRLLIKSVF

SEQ ID NO: 270874 - protein, 15 aa, Artificial Sequence
  Description of Artificial Sequence: Synthetic peptide
  Seed: SIGKVCRTLLAKSVF
SIMKVIRRLLKKSVF

SEQ ID NO: 270875 - protein, 15 aa, Artificial Sequence
  Description of Artificial Sequence: Synthetic peptide
  Seed: SIGKVCRTLLAKSVF
SIMKVIRRLLLKSVF

SEQ ID NO: 270876 - protein, 15 aa, Artificial Sequence
  Description of Artificial Sequence: Synthetic peptide
  Seed: SIGKVCRTLLAKSVF
SIMKVIRRLLMKSVF

SEQ ID NO: 270877 - protein, 15 aa, Artificial Sequence
  Description of Artificial Sequence: Synthetic peptide
  Seed: SIGKVCRTLLAKSVF
SIMKVIRRLLNKSVF

SEQ ID NO: 270878 - protein, 15 aa, Artificial Sequence
  Description of Artificial Sequence: Synthetic peptide
  Seed: SIGKVCRTLLAKSVF
SIMKVIRRLLPKSVF

SEQ ID NO: 270879 - protein, 15 aa, Artificial Sequence
  Description of Artificial Sequence: Synthetic peptide
  Seed: SIGKVCRTLLAKSVF
SIMKVIRRLLQKSVF

SEQ ID NO: 270880 - protein, 15 aa, Artificial Sequence
  Description of Artificial Sequence: Synthetic peptide
  Seed: SIGKVCRTLLAKSVF
SIMKVIRRLLRKSVF

SEQ ID NO: 270881 - protein, 15 aa, Artificial Sequence
  Description of Artificial Sequence: Synthetic peptide
  Seed: SIGKVCRTLLAKSVF
SIMKVIRRLLSKSVF

SEQ ID NO: 270882 - protein, 15 aa, Artificial Sequence
  Description of Artificial Sequence: Synthetic peptide
  Seed: SIGKVCRTLLAKSVF
SIMKVIRRLLTKSVF

SEQ ID NO: 270883 - protein, 15 aa, Artificial Sequence
  Description of Artificial Sequence: Synthetic peptide
  Seed: SIGKVCRTLLAKSVF
SIMKVIRRLLVKSVF

SEQ ID NO: 270884 - protein, 15 aa, Artificial Sequence
  Description of Artificial Sequence: Synthetic peptide
  Seed: SIGKVCRTLLAKSVF
SIMKVIRRLLWKSVF

SEQ ID NO: 270885 - protein, 15 aa, Artificial Sequence
  Description of Artificial Sequence: Synthetic peptide
  Seed: SIGKVCRTLLAKSVF
SIMKVIRRLLYKSVF

SEQ ID NO: 270886 - protein, 15 aa, Artificial Sequence
  Description of Artificial Sequence: Synthetic peptide
  Seed: SIGKVCRTLLAKSVF
SIMKVIRSLLAKSVF

SEQ ID NO: 270887 - protein, 15 aa, Artificial Sequence
  Description of Artificial Sequence: Synthetic peptide
  Seed: SIGKVCRTLLAKSVF
SIMKVIRSLLDKSVF

SEQ ID NO: 270888 - protein, 15 aa, Artificial Sequence
  Description of Artificial Sequence: Synthetic peptide
  Seed: SIGKVCRTLLAKSVF
SIMKVIRSLLEKSVF

SEQ ID NO: 270889 - protein, 15 aa, Artificial Sequence
  Description of Artificial Sequence: Synthetic peptide
  Seed: SIGKVCRTLLAKSVF
SIMKVIRSLLGKSVF

SEQ ID NO: 270890 - protein, 15 aa, Artificial Sequence
  Description of Artificial Sequence: Synthetic peptide
  Seed: SIGKVCRTLLAKSVF
SIMKVIRSLLHKSVF

SEQ ID NO: 270891 - protein, 15 aa, Artificial Sequence
  Description of Artificial Sequence: Synthetic peptide
  Seed: SIGKVCRTLLAKSVF
SIMKVIRSLLIKSVF

SEQ ID NO: 270892 - protein, 15 aa, Artificial Sequence
  Description of Artificial Sequence: Synthetic peptide
  Seed: SIGKVCRTLLAKSVF
SIMKVIRSLLMKSVF

SEQ ID NO: 270893 - protein, 15 aa, Artificial Sequence
  Description of Artificial Sequence: Synthetic peptide
  Seed: SIGKVCRTLLAKSVF
SIMKVIRSLLNKSVF

SEQ ID NO: 270894 - protein, 15 aa, Artificial Sequence
  Description of Artificial Sequence: Synthetic peptide
  Seed: SIGKVCRTLLAKSVF
SIMKVIRSLLPKSVF

SEQ ID NO: 270895 - protein, 15 aa, Artificial Sequence
  Description of Artificial Sequence: Synthetic peptide
  Seed: SIGKVCRTLLAKSVF
SIMKVIRSLLQKSVF

SEQ ID NO: 270896 - protein, 15 aa, Artificial Sequence
  Description of Artificial Sequence: Synthetic peptide
  Seed: SIGKVCRTLLAKSVF
SIMKVIRSLLSKSVF

SEQ ID NO: 270897 - protein, 15 aa, Artificial Sequence
  Description of Artificial Sequence: Synthetic peptide
  Seed: SIGKVCRTLLAKSVF
SIMKVIRSLLTKSVF

SEQ ID NO: 270898 - protein, 15 aa, Artificial Sequence
  Description of Artificial Sequence: Synthetic peptide
  Seed: SIGKVCRTLLAKSVF
SIMKVIRSLLVKSVF

SEQ ID NO: 270899 - protein, 15 aa, Artificial Sequence
  Description of Artificial Sequence: Synthetic peptide
  Seed: SIGKVCRTLLAKSVF
SIMKVIRSLLYKSVF

SEQ ID NO: 270900 - protein, 15 aa, Artificial Sequence
  Description of Artificial Sequence: Synthetic peptide
  Seed: SIGKVCRTLLAKSVF
SIMKVIRTLLAKSVF

SEQ ID NO: 270901 - protein, 15 aa, Artificial Sequence
  Description of Artificial Sequence: Synthetic peptide
  Seed: SIGKVCRTLLAKSVF
SIMKVIRTLLDKSVF

SEQ ID NO: 270902 - protein, 15 aa, Artificial Sequence
  Description of Artificial Sequence: Synthetic peptide
  Seed: SIGKVCRTLLAKSVF
SIMKVIRTLLEKSVF

SEQ ID NO: 270903 - protein, 15 aa, Artificial Sequence
  Description of Artificial Sequence: Synthetic peptide
  Seed: SIGKVCRTLLAKSVF
SIMKVIRTLLGKSVF

SEQ ID NO: 270904 - protein, 15 aa, Artificial Sequence
  Description of Artificial Sequence: Synthetic peptide
  Seed: SIGKVCRTLLAKSVF
SIMKVIRTLLHKSVF

SEQ ID NO: 270905 - protein, 15 aa, Artificial Sequence
  Description of Artificial Sequence: Synthetic peptide
  Seed: SIGKVCRTLLAKSVF
SIMKVIRTLLMKSVF

SEQ ID NO: 270906 - protein, 15 aa, Artificial Sequence
  Description of Artificial Sequence: Synthetic peptide
  Seed: SIGKVCRTLLAKSVF
SIMKVIRTLLNKSVF

SEQ ID NO: 270907 - protein, 15 aa, Artificial Sequence
  Description of Artificial Sequence: Synthetic peptide
  Seed: SIGKVCRTLLAKSVF
SIMKVIRTLLPKSVF

SEQ ID NO: 270908 - protein, 15 aa, Artificial Sequence
  Description of Artificial Sequence: Synthetic peptide
  Seed: SIGKVCRTLLAKSVF
SIMKVIRTLLQKSVF

SEQ ID NO: 270909 - protein, 15 aa, Artificial Sequence
  Description of Artificial Sequence: Synthetic peptide
  Seed: SIGKVCRTLLAKSVF
SIMKVIRTLLRKSVF

SEQ ID NO: 270910 - protein, 15 aa, Artificial Sequence
  Description of Artificial Sequence: Synthetic peptide
  Seed: SIGKVCRTLLAKSVF
SIMKVIRTLLSKSVF

SEQ ID NO: 270911 - protein, 15 aa, Artificial Sequence
  Description of Artificial Sequence: Synthetic peptide
  Seed: SIGKVCRTLLAKSVF
SIMKVIRTLLTKSVF

SEQ ID NO: 270912 - protein, 15 aa, Artificial Sequence
  Description of Artificial Sequence: Synthetic peptide
  Seed: SIGKVCRTLLAKSVF
SIMKVIRTLLVKSVF

SEQ ID NO: 270913 - protein, 15 aa, Artificial Sequence
  Description of Artificial Sequence: Synthetic peptide
  Seed: SIGKVCRTLLAKSVF
SIMKVIRTLLYKSVF

SEQ ID NO: 270914 - protein, 15 aa, Artificial Sequence
  Description of Artificial Sequence: Synthetic peptide
  Seed: SIGKVCRTLLAKSVF
SIMKVIRVLLAKSVF

SEQ ID NO: 270915 - protein, 15 aa, Artificial Sequence
  Description of Artificial Sequence: Synthetic peptide
  Seed: SIGKVCRTLLAKSVF
SIMKVIRVLLGKSVF

SEQ ID NO: 270916 - protein, 15 aa, Artificial Sequence
  Description of Artificial Sequence: Synthetic peptide
  Seed: SIGKVCRTLLAKSVF
SIMKVIRVLLSKSVF

SEQ ID NO: 270917 - protein, 15 aa, Artificial Sequence
  Description of Artificial Sequence: Synthetic peptide
  Seed: SIGKVCRTLLAKSVF
SIMKVKRALLAKSVF

SEQ ID NO: 270918 - protein, 15 aa, Artificial Sequence
  Description of Artificial Sequence: Synthetic peptide
  Seed: SIGKVCRTLLAKSVF
SIMKVKRALLGKSVF

SEQ ID NO: 270919 - protein, 15 aa, Artificial Sequence
  Description of Artificial Sequence: Synthetic peptide
  Seed: SIGKVCRTLLAKSVF
SIMKVKRALLHKSVF

SEQ ID NO: 270920 - protein, 15 aa, Artificial Sequence
  Description of Artificial Sequence: Synthetic peptide
  Seed: SIGKVCRTLLAKSVF
SIMKVKRALLQKSVF

SEQ ID NO: 270921 - protein, 15 aa, Artificial Sequence
  Description of Artificial Sequence: Synthetic peptide
  Seed: SIGKVCRTLLAKSVF
SIMKVKRALLRKSVF

SEQ ID NO: 270922 - protein, 15 aa, Artificial Sequence
  Description of Artificial Sequence: Synthetic peptide
  Seed: SIGKVCRTLLAKSVF
SIMKVKRALLSKSVF

SEQ ID NO: 270923 - protein, 15 aa, Artificial Sequence
  Description of Artificial Sequence: Synthetic peptide
  Seed: SIGKVCRTLLAKSVF
SIMKVKRELLAKSVF

SEQ ID NO: 270924 - protein, 15 aa, Artificial Sequence
  Description of Artificial Sequence: Synthetic peptide
  Seed: SIGKVCRTLLAKSVF
SIMKVKRELLRKSVF

SEQ ID NO: 270925 - protein, 15 aa, Artificial Sequence
  Description of Artificial Sequence: Synthetic peptide
  Seed: SIGKVCRTLLAKSVF
SIMKVKRGLLAKSVF

SEQ ID NO: 270926 - protein, 15 aa, Artificial Sequence
  Description of Artificial Sequence: Synthetic peptide
  Seed: SIGKVCRTLLAKSVF
SIMKVKRGLLGKSVF

SEQ ID NO: 270927 - protein, 15 aa, Artificial Sequence
  Description of Artificial Sequence: Synthetic peptide
  Seed: SIGKVCRTLLAKSVF
SIMKVKRGLLQKSVF

SEQ ID NO: 270928 - protein, 15 aa, Artificial Sequence
  Description of Artificial Sequence: Synthetic peptide
  Seed: SIGKVCRTLLAKSVF
SIMKVKRHLLAKSVF

SEQ ID NO: 270929 - protein, 15 aa, Artificial Sequence
  Description of Artificial Sequence: Synthetic peptide
  Seed: SIGKVCRTLLAKSVF
SIMKVKRHLLCKSVF

SEQ ID NO: 270930 - protein, 15 aa, Artificial Sequence
  Description of Artificial Sequence: Synthetic peptide
  Seed: SIGKVCRTLLAKSVF
SIMKVKRHLLGKSVF

SEQ ID NO: 270931 - protein, 15 aa, Artificial Sequence
  Description of Artificial Sequence: Synthetic peptide
  Seed: SIGKVCRTLLAKSVF
SIMKVKRHLLQKSVF

SEQ ID NO: 270932 - protein, 15 aa, Artificial Sequence
  Description of Artificial Sequence: Synthetic peptide
  Seed: SIGKVCRTLLAKSVF
SIMKVKRHLLSKSVF

SEQ ID NO: 270933 - protein, 15 aa, Artificial Sequence
  Description of Artificial Sequence: Synthetic peptide
  Seed: SIGKVCRTLLAKSVF
SIMKVKRILLGKSVF

SEQ ID NO: 270934 - protein, 15 aa, Artificial Sequence
  Description of Artificial Sequence: Synthetic peptide
  Seed: SIGKVCRTLLAKSVF
SIMKVKRILLQKSVF

SEQ ID NO: 270935 - protein, 15 aa, Artificial Sequence
  Description of Artificial Sequence: Synthetic peptide
  Seed: SIGKVCRTLLAKSVF
SIMKVKRILLRKSVF

SEQ ID NO: 270936 - protein, 15 aa, Artificial Sequence
  Description of Artificial Sequence: Synthetic peptide
  Seed: SIGKVCRTLLAKSVF
SIMKVKRKLLAKSVF

SEQ ID NO: 270937 - protein, 15 aa, Artificial Sequence
  Description of Artificial Sequence: Synthetic peptide
  Seed: SIGKVCRTLLAKSVF
SIMKVKRKLLCKSVF

SEQ ID NO: 270938 - protein, 15 aa, Artificial Sequence
  Description of Artificial Sequence: Synthetic peptide
  Seed: SIGKVCRTLLAKSVF
SIMKVKRKLLDKSVF

SEQ ID NO: 270939 - protein, 15 aa, Artificial Sequence
  Description of Artificial Sequence: Synthetic peptide
  Seed: SIGKVCRTLLAKSVF
SIMKVKRKLLEKSVF

SEQ ID NO: 270940 - protein, 15 aa, Artificial Sequence
  Description of Artificial Sequence: Synthetic peptide
  Seed: SIGKVCRTLLAKSVF
SIMKVKRKLLFKSVF

SEQ ID NO: 270941 - protein, 15 aa, Artificial Sequence
  Description of Artificial Sequence: Synthetic peptide
  Seed: SIGKVCRTLLAKSVF
SIMKVKRKLLGKSVF

SEQ ID NO: 270942 - protein, 15 aa, Artificial Sequence
  Description of Artificial Sequence: Synthetic peptide
  Seed: SIGKVCRTLLAKSVF
SIMKVKRKLLHKSVF

SEQ ID NO: 270943 - protein, 15 aa, Artificial Sequence
  Description of Artificial Sequence: Synthetic peptide
  Seed: SIGKVCRTLLAKSVF
SIMKVKRKLLIKSVF

SEQ ID NO: 270944 - protein, 15 aa, Artificial Sequence
  Description of Artificial Sequence: Synthetic peptide
  Seed: SIGKVCRTLLAKSVF
SIMKVKRKLLLKSVF

SEQ ID NO: 270945 - protein, 15 aa, Artificial Sequence
  Description of Artificial Sequence: Synthetic peptide
  Seed: SIGKVCRTLLAKSVF
SIMKVKRKLLMKSVF

SEQ ID NO: 270946 - protein, 15 aa, Artificial Sequence
  Description of Artificial Sequence: Synthetic peptide
  Seed: SIGKVCRTLLAKSVF
SIMKVKRKLLNKSVF

SEQ ID NO: 270947 - protein, 15 aa, Artificial Sequence
  Description of Artificial Sequence: Synthetic peptide
  Seed: SIGKVCRTLLAKSVF
SIMKVKRKLLPKSVF

SEQ ID NO: 270948 - protein, 15 aa, Artificial Sequence
  Description of Artificial Sequence: Synthetic peptide
  Seed: SIGKVCRTLLAKSVF
SIMKVKRKLLQKSVF

SEQ ID NO: 270949 - protein, 15 aa, Artificial Sequence
  Description of Artificial Sequence: Synthetic peptide
  Seed: SIGKVCRTLLAKSVF
SIMKVKRKLLRKSVF

SEQ ID NO: 270950 - protein, 15 aa, Artificial Sequence
  Description of Artificial Sequence: Synthetic peptide
  Seed: SIGKVCRTLLAKSVF
SIMKVKRKLLSKSVF

SEQ ID NO: 270951 - protein, 15 aa, Artificial Sequence
  Description of Artificial Sequence: Synthetic peptide
  Seed: SIGKVCRTLLAKSVF
SIMKVKRKLLTKSVF

SEQ ID NO: 270952 - protein, 15 aa, Artificial Sequence
  Description of Artificial Sequence: Synthetic peptide
  Seed: SIGKVCRTLLAKSVF
SIMKVKRKLLVKSVF

SEQ ID NO: 270953 - protein, 15 aa, Artificial Sequence
  Description of Artificial Sequence: Synthetic peptide
  Seed: SIGKVCRTLLAKSVF
SIMKVKRKLLYKSVF

SEQ ID NO: 270954 - protein, 15 aa, Artificial Sequence
  Description of Artificial Sequence: Synthetic peptide
  Seed: SIGKVCRTLLAKSVF
SIMKVKRNLLAKSVF

SEQ ID NO: 270955 - protein, 15 aa, Artificial Sequence
  Description of Artificial Sequence: Synthetic peptide
  Seed: SIGKVCRTLLAKSVF
SIMKVKRNLLEKSVF

SEQ ID NO: 270956 - protein, 15 aa, Artificial Sequence
  Description of Artificial Sequence: Synthetic peptide
  Seed: SIGKVCRTLLAKSVF
SIMKVKRNLLGKSVF

SEQ ID NO: 270957 - protein, 15 aa, Artificial Sequence
  Description of Artificial Sequence: Synthetic peptide
  Seed: SIGKVCRTLLAKSVF
SIMKVKRNLLHKSVF

SEQ ID NO: 270958 - protein, 15 aa, Artificial Sequence
  Description of Artificial Sequence: Synthetic peptide
  Seed: SIGKVCRTLLAKSVF
SIMKVKRNLLMKSVF

SEQ ID NO: 270959 - protein, 15 aa, Artificial Sequence
  Description of Artificial Sequence: Synthetic peptide
  Seed: SIGKVCRTLLAKSVF
SIMKVKRNLLQKSVF

SEQ ID NO: 270960 - protein, 15 aa, Artificial Sequence
  Description of Artificial Sequence: Synthetic peptide
  Seed: SIGKVCRTLLAKSVF
SIMKVKRNLLSKSVF

SEQ ID NO: 270961 - protein, 15 aa, Artificial Sequence
  Description of Artificial Sequence: Synthetic peptide
  Seed: SIGKVCRTLLAKSVF
SIMKVKRNLLYKSVF

SEQ ID NO: 270962 - protein, 15 aa, Artificial Sequence
  Description of Artificial Sequence: Synthetic peptide
  Seed: SIGKVCRTLLAKSVF
SIMKVKRPLLAKSVF

SEQ ID NO: 270963 - protein, 15 aa, Artificial Sequence
  Description of Artificial Sequence: Synthetic peptide
  Seed: SIGKVCRTLLAKSVF
SIMKVKRPLLGKSVF

SEQ ID NO: 270964 - protein, 15 aa, Artificial Sequence
  Description of Artificial Sequence: Synthetic peptide
  Seed: SIGKVCRTLLAKSVF
SIMKVKRPLLQKSVF

SEQ ID NO: 270965 - protein, 15 aa, Artificial Sequence
  Description of Artificial Sequence: Synthetic peptide
  Seed: SIGKVCRTLLAKSVF
SIMKVKRPLLSKSVF

SEQ ID NO: 270966 - protein, 15 aa, Artificial Sequence
  Description of Artificial Sequence: Synthetic peptide
  Seed: SIGKVCRTLLAKSVF
SIMKVKRQLLAKSVF

SEQ ID NO: 270967 - protein, 15 aa, Artificial Sequence
  Description of Artificial Sequence: Synthetic peptide
  Seed: SIGKVCRTLLAKSVF
SIMKVKRQLLGKSVF

SEQ ID NO: 270968 - protein, 15 aa, Artificial Sequence
  Description of Artificial Sequence: Synthetic peptide
  Seed: SIGKVCRTLLAKSVF
SIMKVKRQLLQKSVF

SEQ ID NO: 270969 - protein, 15 aa, Artificial Sequence
  Description of Artificial Sequence: Synthetic peptide
  Seed: SIGKVCRTLLAKSVF
SIMKVKRQLLSKSVF

SEQ ID NO: 270970 - protein, 15 aa, Artificial Sequence
  Description of Artificial Sequence: Synthetic peptide
  Seed: SIGKVCRTLLAKSVF
SIMKVKRRLLAKSVF

SEQ ID NO: 270971 - protein, 15 aa, Artificial Sequence
  Description of Artificial Sequence: Synthetic peptide
  Seed: SIGKVCRTLLAKSVF
SIMKVKRRLLCKSVF

SEQ ID NO: 270972 - protein, 15 aa, Artificial Sequence
  Description of Artificial Sequence: Synthetic peptide
  Seed: SIGKVCRTLLAKSVF
SIMKVKRRLLDKSVF

SEQ ID NO: 270973 - protein, 15 aa, Artificial Sequence
  Description of Artificial Sequence: Synthetic peptide
  Seed: SIGKVCRTLLAKSVF
SIMKVKRRLLEKSVF

SEQ ID NO: 270974 - protein, 15 aa, Artificial Sequence
  Description of Artificial Sequence: Synthetic peptide
  Seed: SIGKVCRTLLAKSVF
SIMKVKRRLLFKSVF

SEQ ID NO: 270975 - protein, 15 aa, Artificial Sequence
  Description of Artificial Sequence: Synthetic peptide
  Seed: SIGKVCRTLLAKSVF
SIMKVKRRLLGKSVF

SEQ ID NO: 270976 - protein, 15 aa, Artificial Sequence
  Description of Artificial Sequence: Synthetic peptide
  Seed: SIGKVCRTLLAKSVF
SIMKVKRRLLHKSVF

SEQ ID NO: 270977 - protein, 15 aa, Artificial Sequence
  Description of Artificial Sequence: Synthetic peptide
  Seed: SIGKVCRTLLAKSVF
SIMKVKRRLLIKSVF

SEQ ID NO: 270978 - protein, 15 aa, Artificial Sequence
  Description of Artificial Sequence: Synthetic peptide
  Seed: SIGKVCRTLLAKSVF
SIMKVKRRLLLKSVF

SEQ ID NO: 270979 - protein, 15 aa, Artificial Sequence
  Description of Artificial Sequence: Synthetic peptide
  Seed: SIGKVCRTLLAKSVF
SIMKVKRRLLMKSVF

SEQ ID NO: 270980 - protein, 15 aa, Artificial Sequence
  Description of Artificial Sequence: Synthetic peptide
  Seed: SIGKVCRTLLAKSVF
SIMKVKRRLLNKSVF

SEQ ID NO: 270981 - protein, 15 aa, Artificial Sequence
  Description of Artificial Sequence: Synthetic peptide
  Seed: SIGKVCRTLLAKSVF
SIMKVKRRLLPKSVF

SEQ ID NO: 270982 - protein, 15 aa, Artificial Sequence
  Description of Artificial Sequence: Synthetic peptide
  Seed: SIGKVCRTLLAKSVF
SIMKVKRRLLQKSVF

SEQ ID NO: 270983 - protein, 15 aa, Artificial Sequence
  Description of Artificial Sequence: Synthetic peptide
  Seed: SIGKVCRTLLAKSVF
SIMKVKRRLLRKSVF

SEQ ID NO: 270984 - protein, 15 aa, Artificial Sequence
  Description of Artificial Sequence: Synthetic peptide
  Seed: SIGKVCRTLLAKSVF
SIMKVKRRLLSKSVF

SEQ ID NO: 270985 - protein, 15 aa, Artificial Sequence
  Description of Artificial Sequence: Synthetic peptide
  Seed: SIGKVCRTLLAKSVF
SIMKVKRRLLTKSVF

SEQ ID NO: 270986 - protein, 15 aa, Artificial Sequence
  Description of Artificial Sequence: Synthetic peptide
  Seed: SIGKVCRTLLAKSVF
SIMKVKRRLLVKSVF

SEQ ID NO: 270987 - protein, 15 aa, Artificial Sequence
  Description of Artificial Sequence: Synthetic peptide
  Seed: SIGKVCRTLLAKSVF
SIMKVKRRLLYKSVF

SEQ ID NO: 270988 - protein, 15 aa, Artificial Sequence
  Description of Artificial Sequence: Synthetic peptide
  Seed: SIGKVCRTLLAKSVF
SIMKVKRSLLAKSVF

SEQ ID NO: 270989 - protein, 15 aa, Artificial Sequence
  Description of Artificial Sequence: Synthetic peptide
  Seed: SIGKVCRTLLAKSVF
SIMKVKRSLLEKSVF

SEQ ID NO: 270990 - protein, 15 aa, Artificial Sequence
  Description of Artificial Sequence: Synthetic peptide
  Seed: SIGKVCRTLLAKSVF
SIMKVKRSLLGKSVF

SEQ ID NO: 270991 - protein, 15 aa, Artificial Sequence
  Description of Artificial Sequence: Synthetic peptide
  Seed: SIGKVCRTLLAKSVF
SIMKVKRSLLHKSVF

SEQ ID NO: 270992 - protein, 15 aa, Artificial Sequence
  Description of Artificial Sequence: Synthetic peptide
  Seed: SIGKVCRTLLAKSVF
SIMKVKRSLLMKSVF

SEQ ID NO: 270993 - protein, 15 aa, Artificial Sequence
  Description of Artificial Sequence: Synthetic peptide
  Seed: SIGKVCRTLLAKSVF
SIMKVKRSLLNKSVF

SEQ ID NO: 270994 - protein, 15 aa, Artificial Sequence
  Description of Artificial Sequence: Synthetic peptide
  Seed: SIGKVCRTLLAKSVF
SIMKVKRSLLQKSVF

SEQ ID NO: 270995 - protein, 15 aa, Artificial Sequence
  Description of Artificial Sequence: Synthetic peptide
  Seed: SIGKVCRTLLAKSVF
SIMKVKRSLLRKSVF

SEQ ID NO: 270996 - protein, 15 aa, Artificial Sequence
  Description of Artificial Sequence: Synthetic peptide
  Seed: SIGKVCRTLLAKSVF
SIMKVKRSLLSKSVF

SEQ ID NO: 270997 - protein, 15 aa, Artificial Sequence
  Description of Artificial Sequence: Synthetic peptide
  Seed: SIGKVCRTLLAKSVF
SIMKVKRSLLTKSVF

SEQ ID NO: 270998 - protein, 15 aa, Artificial Sequence
  Description of Artificial Sequence: Synthetic peptide
  Seed: SIGKVCRTLLAKSVF
SIMKVKRSLLVKSVF

SEQ ID NO: 270999 - protein, 15 aa, Artificial Sequence
  Description of Artificial Sequence: Synthetic peptide
  Seed: SIGKVCRTLLAKSVF
SIMKVKRSLLYKSVF

SEQ ID NO: 271000 - protein, 15 aa, Artificial Sequence
  Description of Artificial Sequence: Synthetic peptide
  Seed: SIGKVCRTLLAKSVF
SIMKVKRTLLAKSVF

SEQ ID NO: 271001 - protein, 15 aa, Artificial Sequence
  Description of Artificial Sequence: Synthetic peptide
  Seed: SIGKVCRTLLAKSVF
SIMKVKRTLLEKSVF

SEQ ID NO: 271002 - protein, 15 aa, Artificial Sequence
  Description of Artificial Sequence: Synthetic peptide
  Seed: SIGKVCRTLLAKSVF
SIMKVKRTLLFKSVF

SEQ ID NO: 271003 - protein, 15 aa, Artificial Sequence
  Description of Artificial Sequence: Synthetic peptide
  Seed: SIGKVCRTLLAKSVF
SIMKVKRTLLGKSVF

SEQ ID NO: 271004 - protein, 15 aa, Artificial Sequence
  Description of Artificial Sequence: Synthetic peptide
  Seed: SIGKVCRTLLAKSVF
SIMKVKRTLLHKSVF

SEQ ID NO: 271005 - protein, 15 aa, Artificial Sequence
  Description of Artificial Sequence: Synthetic peptide
  Seed: SIGKVCRTLLAKSVF
SIMKVKRTLLIKSVF

SEQ ID NO: 271006 - protein, 15 aa, Artificial Sequence
  Description of Artificial Sequence: Synthetic peptide
  Seed: SIGKVCRTLLAKSVF
SIMKVKRTLLKKSVF

SEQ ID NO: 271007 - protein, 15 aa, Artificial Sequence
  Description of Artificial Sequence: Synthetic peptide
  Seed: SIGKVCRTLLAKSVF
SIMKVKRTLLLKSVF

SEQ ID NO: 271008 - protein, 15 aa, Artificial Sequence
  Description of Artificial Sequence: Synthetic peptide
  Seed: SIGKVCRTLLAKSVF
SIMKVKRTLLMKSVF

SEQ ID NO: 271009 - protein, 15 aa, Artificial Sequence
  Description of Artificial Sequence: Synthetic peptide
  Seed: SIGKVCRTLLAKSVF
SIMKVKRTLLNKSVF

SEQ ID NO: 271010 - protein, 15 aa, Artificial Sequence
  Description of Artificial Sequence: Synthetic peptide
  Seed: SIGKVCRTLLAKSVF
SIMKVKRTLLQKSVF

SEQ ID NO: 271011 - protein, 15 aa, Artificial Sequence
  Description of Artificial Sequence: Synthetic peptide
  Seed: SIGKVCRTLLAKSVF
SIMKVKRTLLRKSVF

SEQ ID NO: 271012 - protein, 15 aa, Artificial Sequence
  Description of Artificial Sequence: Synthetic peptide
  Seed: SIGKVCRTLLAKSVF
SIMKVKRTLLSKSVF

SEQ ID NO: 271013 - protein, 15 aa, Artificial Sequence
  Description of Artificial Sequence: Synthetic peptide
  Seed: SIGKVCRTLLAKSVF
SIMKVKRTLLTKSVF

SEQ ID NO: 271014 - protein, 15 aa, Artificial Sequence
  Description of Artificial Sequence: Synthetic peptide
  Seed: SIGKVCRTLLAKSVF
SIMKVKRTLLVKSVF

SEQ ID NO: 271015 - protein, 15 aa, Artificial Sequence
  Description of Artificial Sequence: Synthetic peptide
  Seed: SIGKVCRTLLAKSVF
SIMKVKRTLLYKSVF

SEQ ID NO: 271016 - protein, 15 aa, Artificial Sequence
  Description of Artificial Sequence: Synthetic peptide
  Seed: SIGKVCRTLLAKSVF
SIMKVKRVLLAKSVF

SEQ ID NO: 271017 - protein, 15 aa, Artificial Sequence
  Description of Artificial Sequence: Synthetic peptide
  Seed: SIGKVCRTLLAKSVF
SIMKVKRVLLDKSVF

SEQ ID NO: 271018 - protein, 15 aa, Artificial Sequence
  Description of Artificial Sequence: Synthetic peptide
  Seed: SIGKVCRTLLAKSVF
SIMKVKRVLLEKSVF

SEQ ID NO: 271019 - protein, 15 aa, Artificial Sequence
  Description of Artificial Sequence: Synthetic peptide
  Seed: SIGKVCRTLLAKSVF
SIMKVKRVLLGKSVF

SEQ ID NO: 271020 - protein, 15 aa, Artificial Sequence
  Description of Artificial Sequence: Synthetic peptide
  Seed: SIGKVCRTLLAKSVF
SIMKVKRVLLHKSVF

SEQ ID NO: 271021 - protein, 15 aa, Artificial Sequence
  Description of Artificial Sequence: Synthetic peptide
  Seed: SIGKVCRTLLAKSVF
SIMKVKRVLLQKSVF

SEQ ID NO: 271022 - protein, 15 aa, Artificial Sequence
  Description of Artificial Sequence: Synthetic peptide
  Seed: SIGKVCRTLLAKSVF
SIMKVKRVLLRKSVF

SEQ ID NO: 271023 - protein, 15 aa, Artificial Sequence
  Description of Artificial Sequence: Synthetic peptide
  Seed: SIGKVCRTLLAKSVF
SIMKVKRVLLSKSVF

SEQ ID NO: 271024 - protein, 15 aa, Artificial Sequence
  Description of Artificial Sequence: Synthetic peptide
  Seed: SIGKVCRTLLAKSVF
SIMKVKRVLLYKSVF

SEQ ID NO: 271025 - protein, 15 aa, Artificial Sequence
  Description of Artificial Sequence: Synthetic peptide
  Seed: SIGKVCRTLLAKSVF
SIMKVLRALLAKSVF

SEQ ID NO: 271026 - protein, 15 aa, Artificial Sequence
  Description of Artificial Sequence: Synthetic peptide
  Seed: SIGKVCRTLLAKSVF
SIMKVLRALLGKSVF

SEQ ID NO: 271027 - protein, 15 aa, Artificial Sequence
  Description of Artificial Sequence: Synthetic peptide
  Seed: SIGKVCRTLLAKSVF
SIMKVLRALLHKSVF

SEQ ID NO: 271028 - protein, 15 aa, Artificial Sequence
  Description of Artificial Sequence: Synthetic peptide
  Seed: SIGKVCRTLLAKSVF
SIMKVLRALLNKSVF

SEQ ID NO: 271029 - protein, 15 aa, Artificial Sequence
  Description of Artificial Sequence: Synthetic peptide
  Seed: SIGKVCRTLLAKSVF
SIMKVLRALLPKSVF

SEQ ID NO: 271030 - protein, 15 aa, Artificial Sequence
  Description of Artificial Sequence: Synthetic peptide
  Seed: SIGKVCRTLLAKSVF
SIMKVLRALLQKSVF

SEQ ID NO: 271031 - protein, 15 aa, Artificial Sequence
  Description of Artificial Sequence: Synthetic peptide
  Seed: SIGKVCRTLLAKSVF
SIMKVLRALLSKSVF

SEQ ID NO: 271032 - protein, 15 aa, Artificial Sequence
  Description of Artificial Sequence: Synthetic peptide
  Seed: SIGKVCRTLLAKSVF
SIMKVLRALLTKSVF

SEQ ID NO: 271033 - protein, 15 aa, Artificial Sequence
  Description of Artificial Sequence: Synthetic peptide
  Seed: SIGKVCRTLLAKSVF
SIMKVLRALLVKSVF

SEQ ID NO: 271034 - protein, 15 aa, Artificial Sequence
  Description of Artificial Sequence: Synthetic peptide
  Seed: SIGKVCRTLLAKSVF
SIMKVLRALLYKSVF

SEQ ID NO: 271035 - protein, 15 aa, Artificial Sequence
  Description of Artificial Sequence: Synthetic peptide
  Seed: SIGKVCRTLLAKSVF
SIMKVLRELLSKSVF

SEQ ID NO: 271036 - protein, 15 aa, Artificial Sequence
  Description of Artificial Sequence: Synthetic peptide
  Seed: SIGKVCRTLLAKSVF
SIMKVLRGLLAKSVF

SEQ ID NO: 271037 - protein, 15 aa, Artificial Sequence
  Description of Artificial Sequence: Synthetic peptide
  Seed: SIGKVCRTLLAKSVF
SIMKVLRGLLGKSVF

SEQ ID NO: 271038 - protein, 15 aa, Artificial Sequence
  Description of Artificial Sequence: Synthetic peptide
  Seed: SIGKVCRTLLAKSVF
SIMKVLRGLLHKSVF

SEQ ID NO: 271039 - protein, 15 aa, Artificial Sequence
  Description of Artificial Sequence: Synthetic peptide
  Seed: SIGKVCRTLLAKSVF
SIMKVLRGLLMKSVF

SEQ ID NO: 271040 - protein, 15 aa, Artificial Sequence
  Description of Artificial Sequence: Synthetic peptide
  Seed: SIGKVCRTLLAKSVF
SIMKVLRGLLNKSVF

SEQ ID NO: 271041 - protein, 15 aa, Artificial Sequence
  Description of Artificial Sequence: Synthetic peptide
  Seed: SIGKVCRTLLAKSVF
SIMKVLRGLLQKSVF

SEQ ID NO: 271042 - protein, 15 aa, Artificial Sequence
  Description of Artificial Sequence: Synthetic peptide
  Seed: SIGKVCRTLLAKSVF
SIMKVLRGLLSKSVF

SEQ ID NO: 271043 - protein, 15 aa, Artificial Sequence
  Description of Artificial Sequence: Synthetic peptide
  Seed: SIGKVCRTLLAKSVF
SIMKVLRGLLTKSVF

SEQ ID NO: 271044 - protein, 15 aa, Artificial Sequence
  Description of Artificial Sequence: Synthetic peptide
  Seed: SIGKVCRTLLAKSVF
SIMKVLRGLLVKSVF

SEQ ID NO: 271045 - protein, 15 aa, Artificial Sequence
  Description of Artificial Sequence: Synthetic peptide
  Seed: SIGKVCRTLLAKSVF
SIMKVLRGLLYKSVF

SEQ ID NO: 271046 - protein, 15 aa, Artificial Sequence
  Description of Artificial Sequence: Synthetic peptide
  Seed: SIGKVCRTLLAKSVF
SIMKVLRHLLAKSVF

SEQ ID NO: 271047 - protein, 15 aa, Artificial Sequence
  Description of Artificial Sequence: Synthetic peptide
  Seed: SIGKVCRTLLAKSVF
SIMKVLRHLLDKSVF

SEQ ID NO: 271048 - protein, 15 aa, Artificial Sequence
  Description of Artificial Sequence: Synthetic peptide
  Seed: SIGKVCRTLLAKSVF
SIMKVLRHLLEKSVF

SEQ ID NO: 271049 - protein, 15 aa, Artificial Sequence
  Description of Artificial Sequence: Synthetic peptide
  Seed: SIGKVCRTLLAKSVF
SIMKVLRHLLGKSVF

SEQ ID NO: 271050 - protein, 15 aa, Artificial Sequence
  Description of Artificial Sequence: Synthetic peptide
  Seed: SIGKVCRTLLAKSVF
SIMKVLRHLLHKSVF

SEQ ID NO: 271051 - protein, 15 aa, Artificial Sequence
  Description of Artificial Sequence: Synthetic peptide
  Seed: SIGKVCRTLLAKSVF
SIMKVLRHLLIKSVF

SEQ ID NO: 271052 - protein, 15 aa, Artificial Sequence
  Description of Artificial Sequence: Synthetic peptide
  Seed: SIGKVCRTLLAKSVF
SIMKVLRHLLKKSVF

SEQ ID NO: 271053 - protein, 15 aa, Artificial Sequence
  Description of Artificial Sequence: Synthetic peptide
  Seed: SIGKVCRTLLAKSVF
SIMKVLRHLLLKSVF

SEQ ID NO: 271054 - protein, 15 aa, Artificial Sequence
  Description of Artificial Sequence: Synthetic peptide
  Seed: SIGKVCRTLLAKSVF
SIMKVLRHLLMKSVF

SEQ ID NO: 271055 - protein, 15 aa, Artificial Sequence
  Description of Artificial Sequence: Synthetic peptide
  Seed: SIGKVCRTLLAKSVF
SIMKVLRHLLNKSVF

SEQ ID NO: 271056 - protein, 15 aa, Artificial Sequence
  Description of Artificial Sequence: Synthetic peptide
  Seed: SIGKVCRTLLAKSVF
SIMKVLRHLLPKSVF

SEQ ID NO: 271057 - protein, 15 aa, Artificial Sequence
  Description of Artificial Sequence: Synthetic peptide
  Seed: SIGKVCRTLLAKSVF
SIMKVLRHLLQKSVF

SEQ ID NO: 271058 - protein, 15 aa, Artificial Sequence
  Description of Artificial Sequence: Synthetic peptide
  Seed: SIGKVCRTLLAKSVF
SIMKVLRHLLRKSVF

SEQ ID NO: 271059 - protein, 15 aa, Artificial Sequence
  Description of Artificial Sequence: Synthetic peptide
  Seed: SIGKVCRTLLAKSVF
SIMKVLRHLLSKSVF

SEQ ID NO: 271060 - protein, 15 aa, Artificial Sequence
  Description of Artificial Sequence: Synthetic peptide
  Seed: SIGKVCRTLLAKSVF
SIMKVLRHLLTKSVF

SEQ ID NO: 271061 - protein, 15 aa, Artificial Sequence
  Description of Artificial Sequence: Synthetic peptide
  Seed: SIGKVCRTLLAKSVF
SIMKVLRHLLVKSVF

SEQ ID NO: 271062 - protein, 15 aa, Artificial Sequence
  Description of Artificial Sequence: Synthetic peptide
  Seed: SIGKVCRTLLAKSVF
SIMKVLRHLLYKSVF

SEQ ID NO: 271063 - protein, 15 aa, Artificial Sequence
  Description of Artificial Sequence: Synthetic peptide
  Seed: SIGKVCRTLLAKSVF
SIMKVLRILLAKSVF

SEQ ID NO: 271064 - protein, 15 aa, Artificial Sequence
  Description of Artificial Sequence: Synthetic peptide
  Seed: SIGKVCRTLLAKSVF
SIMKVLRILLGKSVF

SEQ ID NO: 271065 - protein, 15 aa, Artificial Sequence
  Description of Artificial Sequence: Synthetic peptide
  Seed: SIGKVCRTLLAKSVF
SIMKVLRILLSKSVF

SEQ ID NO: 271066 - protein, 15 aa, Artificial Sequence
  Description of Artificial Sequence: Synthetic peptide
  Seed: SIGKVCRTLLAKSVF
SIMKVLRKLLAKSVF

SEQ ID NO: 271067 - protein, 15 aa, Artificial Sequence
  Description of Artificial Sequence: Synthetic peptide
  Seed: SIGKVCRTLLAKSVF
SIMKVLRKLLCKSVF

SEQ ID NO: 271068 - protein, 15 aa, Artificial Sequence
  Description of Artificial Sequence: Synthetic peptide
  Seed: SIGKVCRTLLAKSVF
SIMKVLRKLLDKSVF

SEQ ID NO: 271069 - protein, 15 aa, Artificial Sequence
  Description of Artificial Sequence: Synthetic peptide
  Seed: SIGKVCRTLLAKSVF
SIMKVLRKLLEKSVF

SEQ ID NO: 271070 - protein, 15 aa, Artificial Sequence
  Description of Artificial Sequence: Synthetic peptide
  Seed: SIGKVCRTLLAKSVF
SIMKVLRKLLFKSVF

SEQ ID NO: 271071 - protein, 15 aa, Artificial Sequence
  Description of Artificial Sequence: Synthetic peptide
  Seed: SIGKVCRTLLAKSVF
SIMKVLRKLLGKSVF

SEQ ID NO: 271072 - protein, 15 aa, Artificial Sequence
  Description of Artificial Sequence: Synthetic peptide
  Seed: SIGKVCRTLLAKSVF
SIMKVLRKLLHKSVF

SEQ ID NO: 271073 - protein, 15 aa, Artificial Sequence
  Description of Artificial Sequence: Synthetic peptide
  Seed: SIGKVCRTLLAKSVF
SIMKVLRKLLIKSVF

SEQ ID NO: 271074 - protein, 15 aa, Artificial Sequence
  Description of Artificial Sequence: Synthetic peptide
  Seed: SIGKVCRTLLAKSVF
SIMKVLRKLLKKSVF

SEQ ID NO: 271075 - protein, 15 aa, Artificial Sequence
  Description of Artificial Sequence: Synthetic peptide
  Seed: SIGKVCRTLLAKSVF
SIMKVLRKLLLKSVF

SEQ ID NO: 271076 - protein, 15 aa, Artificial Sequence
  Description of Artificial Sequence: Synthetic peptide
  Seed: SIGKVCRTLLAKSVF
SIMKVLRKLLMKSVF

SEQ ID NO: 271077 - protein, 15 aa, Artificial Sequence
  Description of Artificial Sequence: Synthetic peptide
  Seed: SIGKVCRTLLAKSVF
SIMKVLRKLLNKSVF

SEQ ID NO: 271078 - protein, 15 aa, Artificial Sequence
  Description of Artificial Sequence: Synthetic peptide
  Seed: SIGKVCRTLLAKSVF
SIMKVLRKLLPKSVF

SEQ ID NO: 271079 - protein, 15 aa, Artificial Sequence
  Description of Artificial Sequence: Synthetic peptide
  Seed: SIGKVCRTLLAKSVF
SIMKVLRKLLQKSVF

SEQ ID NO: 271080 - protein, 15 aa, Artificial Sequence
  Description of Artificial Sequence: Synthetic peptide
  Seed: SIGKVCRTLLAKSVF
SIMKVLRKLLRKSVF

SEQ ID NO: 271081 - protein, 15 aa, Artificial Sequence
  Description of Artificial Sequence: Synthetic peptide
  Seed: SIGKVCRTLLAKSVF
SIMKVLRKLLSKSVF

SEQ ID NO: 271082 - protein, 15 aa, Artificial Sequence
  Description of Artificial Sequence: Synthetic peptide
  Seed: SIGKVCRTLLAKSVF
SIMKVLRKLLTKSVF

SEQ ID NO: 271083 - protein, 15 aa, Artificial Sequence
  Description of Artificial Sequence: Synthetic peptide
  Seed: SIGKVCRTLLAKSVF
SIMKVLRKLLVKSVF

SEQ ID NO: 271084 - protein, 15 aa, Artificial Sequence
  Description of Artificial Sequence: Synthetic peptide
  Seed: SIGKVCRTLLAKSVF
SIMKVLRKLLWKSVF

SEQ ID NO: 271085 - protein, 15 aa, Artificial Sequence
  Description of Artificial Sequence: Synthetic peptide
  Seed: SIGKVCRTLLAKSVF
SIMKVLRKLLYKSVF

SEQ ID NO: 271086 - protein, 15 aa, Artificial Sequence
  Description of Artificial Sequence: Synthetic peptide
  Seed: SIGKVCRTLLAKSVF
SIMKVLRMLLSKSVF

SEQ ID NO: 271087 - protein, 15 aa, Artificial Sequence
  Description of Artificial Sequence: Synthetic peptide
  Seed: SIGKVCRTLLAKSVF
SIMKVLRNLLAKSVF

SEQ ID NO: 271088 - protein, 15 aa, Artificial Sequence
  Description of Artificial Sequence: Synthetic peptide
  Seed: SIGKVCRTLLAKSVF
SIMKVLRNLLDKSVF

SEQ ID NO: 271089 - protein, 15 aa, Artificial Sequence
  Description of Artificial Sequence: Synthetic peptide
  Seed: SIGKVCRTLLAKSVF
SIMKVLRNLLEKSVF

SEQ ID NO: 271090 - protein, 15 aa, Artificial Sequence
  Description of Artificial Sequence: Synthetic peptide
  Seed: SIGKVCRTLLAKSVF
SIMKVLRNLLGKSVF

SEQ ID NO: 271091 - protein, 15 aa, Artificial Sequence
  Description of Artificial Sequence: Synthetic peptide
  Seed: SIGKVCRTLLAKSVF
SIMKVLRNLLHKSVF

SEQ ID NO: 271092 - protein, 15 aa, Artificial Sequence
  Description of Artificial Sequence: Synthetic peptide
  Seed: SIGKVCRTLLAKSVF
SIMKVLRNLLMKSVF

SEQ ID NO: 271093 - protein, 15 aa, Artificial Sequence
  Description of Artificial Sequence: Synthetic peptide
  Seed: SIGKVCRTLLAKSVF
SIMKVLRNLLNKSVF

SEQ ID NO: 271094 - protein, 15 aa, Artificial Sequence
  Description of Artificial Sequence: Synthetic peptide
  Seed: SIGKVCRTLLAKSVF
SIMKVLRNLLPKSVF

SEQ ID NO: 271095 - protein, 15 aa, Artificial Sequence
  Description of Artificial Sequence: Synthetic peptide
  Seed: SIGKVCRTLLAKSVF
SIMKVLRNLLQKSVF

SEQ ID NO: 271096 - protein, 15 aa, Artificial Sequence
  Description of Artificial Sequence: Synthetic peptide
  Seed: SIGKVCRTLLAKSVF
SIMKVLRNLLRKSVF

SEQ ID NO: 271097 - protein, 15 aa, Artificial Sequence
  Description of Artificial Sequence: Synthetic peptide
  Seed: SIGKVCRTLLAKSVF
SIMKVLRNLLSKSVF

SEQ ID NO: 271098 - protein, 15 aa, Artificial Sequence
  Description of Artificial Sequence: Synthetic peptide
  Seed: SIGKVCRTLLAKSVF
SIMKVLRNLLTKSVF

SEQ ID NO: 271099 - protein, 15 aa, Artificial Sequence
  Description of Artificial Sequence: Synthetic peptide
  Seed: SIGKVCRTLLAKSVF
SIMKVLRNLLVKSVF

SEQ ID NO: 271100 - protein, 15 aa, Artificial Sequence
  Description of Artificial Sequence: Synthetic peptide
  Seed: SIGKVCRTLLAKSVF
SIMKVLRNLLYKSVF

SEQ ID NO: 271101 - protein, 15 aa, Artificial Sequence
  Description of Artificial Sequence: Synthetic peptide
  Seed: SIGKVCRTLLAKSVF
SIMKVLRPLLAKSVF

SEQ ID NO: 271102 - protein, 15 aa, Artificial Sequence
  Description of Artificial Sequence: Synthetic peptide
  Seed: SIGKVCRTLLAKSVF
SIMKVLRPLLGKSVF

SEQ ID NO: 271103 - protein, 15 aa, Artificial Sequence
  Description of Artificial Sequence: Synthetic peptide
  Seed: SIGKVCRTLLAKSVF
SIMKVLRPLLHKSVF

SEQ ID NO: 271104 - protein, 15 aa, Artificial Sequence
  Description of Artificial Sequence: Synthetic peptide
  Seed: SIGKVCRTLLAKSVF
SIMKVLRPLLIKSVF

SEQ ID NO: 271105 - protein, 15 aa, Artificial Sequence
  Description of Artificial Sequence: Synthetic peptide
  Seed: SIGKVCRTLLAKSVF
SIMKVLRPLLLKSVF

SEQ ID NO: 271106 - protein, 15 aa, Artificial Sequence
  Description of Artificial Sequence: Synthetic peptide
  Seed: SIGKVCRTLLAKSVF
SIMKVLRPLLMKSVF

SEQ ID NO: 271107 - protein, 15 aa, Artificial Sequence
  Description of Artificial Sequence: Synthetic peptide
  Seed: SIGKVCRTLLAKSVF
SIMKVLRPLLNKSVF

SEQ ID NO: 271108 - protein, 15 aa, Artificial Sequence
  Description of Artificial Sequence: Synthetic peptide
  Seed: SIGKVCRTLLAKSVF
SIMKVLRPLLPKSVF

SEQ ID NO: 271109 - protein, 15 aa, Artificial Sequence
  Description of Artificial Sequence: Synthetic peptide
  Seed: SIGKVCRTLLAKSVF
SIMKVLRPLLQKSVF

SEQ ID NO: 271110 - protein, 15 aa, Artificial Sequence
  Description of Artificial Sequence: Synthetic peptide
  Seed: SIGKVCRTLLAKSVF
SIMKVLRPLLSKSVF

SEQ ID NO: 271111 - protein, 15 aa, Artificial Sequence
  Description of Artificial Sequence: Synthetic peptide
  Seed: SIGKVCRTLLAKSVF
SIMKVLRPLLTKSVF

SEQ ID NO: 271112 - protein, 15 aa, Artificial Sequence
  Description of Artificial Sequence: Synthetic peptide
  Seed: SIGKVCRTLLAKSVF
SIMKVLRPLLVKSVF

SEQ ID NO: 271113 - protein, 15 aa, Artificial Sequence
  Description of Artificial Sequence: Synthetic peptide
  Seed: SIGKVCRTLLAKSVF
SIMKVLRPLLYKSVF

SEQ ID NO: 271114 - protein, 15 aa, Artificial Sequence
  Description of Artificial Sequence: Synthetic peptide
  Seed: SIGKVCRTLLAKSVF
SIMKVLRQLLAKSVF

SEQ ID NO: 271115 - protein, 15 aa, Artificial Sequence
  Description of Artificial Sequence: Synthetic peptide
  Seed: SIGKVCRTLLAKSVF
SIMKVLRQLLGKSVF

SEQ ID NO: 271116 - protein, 15 aa, Artificial Sequence
  Description of Artificial Sequence: Synthetic peptide
  Seed: SIGKVCRTLLAKSVF
SIMKVLRQLLHKSVF

SEQ ID NO: 271117 - protein, 15 aa, Artificial Sequence
  Description of Artificial Sequence: Synthetic peptide
  Seed: SIGKVCRTLLAKSVF
SIMKVLRQLLNKSVF

SEQ ID NO: 271118 - protein, 15 aa, Artificial Sequence
  Description of Artificial Sequence: Synthetic peptide
  Seed: SIGKVCRTLLAKSVF
SIMKVLRQLLQKSVF

SEQ ID NO: 271119 - protein, 15 aa, Artificial Sequence
  Description of Artificial Sequence: Synthetic peptide
  Seed: SIGKVCRTLLAKSVF
SIMKVLRQLLSKSVF

SEQ ID NO: 271120 - protein, 15 aa, Artificial Sequence
  Description of Artificial Sequence: Synthetic peptide
  Seed: SIGKVCRTLLAKSVF
SIMKVLRQLLTKSVF

SEQ ID NO: 271121 - protein, 15 aa, Artificial Sequence
  Description of Artificial Sequence: Synthetic peptide
  Seed: SIGKVCRTLLAKSVF
SIMKVLRRLLAKSVF

SEQ ID NO: 271122 - protein, 15 aa, Artificial Sequence
  Description of Artificial Sequence: Synthetic peptide
  Seed: SIGKVCRTLLAKSVF
SIMKVLRRLLCKSVF

SEQ ID NO: 271123 - protein, 15 aa, Artificial Sequence
  Description of Artificial Sequence: Synthetic peptide
  Seed: SIGKVCRTLLAKSVF
SIMKVLRRLLDKSVF

SEQ ID NO: 271124 - protein, 15 aa, Artificial Sequence
  Description of Artificial Sequence: Synthetic peptide
  Seed: SIGKVCRTLLAKSVF
SIMKVLRRLLEKSVF

SEQ ID NO: 271125 - protein, 15 aa, Artificial Sequence
  Description of Artificial Sequence: Synthetic peptide
  Seed: SIGKVCRTLLAKSVF
SIMKVLRRLLFKSVF

SEQ ID NO: 271126 - protein, 15 aa, Artificial Sequence
  Description of Artificial Sequence: Synthetic peptide
  Seed: SIGKVCRTLLAKSVF
SIMKVLRRLLGKSVF

SEQ ID NO: 271127 - protein, 15 aa, Artificial Sequence
  Description of Artificial Sequence: Synthetic peptide
  Seed: SIGKVCRTLLAKSVF
SIMKVLRRLLHKSVF

SEQ ID NO: 271128 - protein, 15 aa, Artificial Sequence
  Description of Artificial Sequence: Synthetic peptide
  Seed: SIGKVCRTLLAKSVF
SIMKVLRRLLIKSVF

SEQ ID NO: 271129 - protein, 15 aa, Artificial Sequence
  Description of Artificial Sequence: Synthetic peptide
  Seed: SIGKVCRTLLAKSVF
SIMKVLRRLLKKSVF

SEQ ID NO: 271130 - protein, 15 aa, Artificial Sequence
  Description of Artificial Sequence: Synthetic peptide
  Seed: SIGKVCRTLLAKSVF
SIMKVLRRLLLKSVF

SEQ ID NO: 271131 - protein, 15 aa, Artificial Sequence
  Description of Artificial Sequence: Synthetic peptide
  Seed: SIGKVCRTLLAKSVF
SIMKVLRRLLMKSVF

SEQ ID NO: 271132 - protein, 15 aa, Artificial Sequence
  Description of Artificial Sequence: Synthetic peptide
  Seed: SIGKVCRTLLAKSVF
SIMKVLRRLLNKSVF

SEQ ID NO: 271133 - protein, 15 aa, Artificial Sequence
  Description of Artificial Sequence: Synthetic peptide
  Seed: SIGKVCRTLLAKSVF
SIMKVLRRLLPKSVF

SEQ ID NO: 271134 - protein, 15 aa, Artificial Sequence
  Description of Artificial Sequence: Synthetic peptide
  Seed: SIGKVCRTLLAKSVF
SIMKVLRRLLQKSVF

SEQ ID NO: 271135 - protein, 15 aa, Artificial Sequence
  Description of Artificial Sequence: Synthetic peptide
  Seed: SIGKVCRTLLAKSVF
SIMKVLRRLLRKSVF

SEQ ID NO: 271136 - protein, 15 aa, Artificial Sequence
  Description of Artificial Sequence: Synthetic peptide
  Seed: SIGKVCRTLLAKSVF
SIMKVLRRLLSKSVF

SEQ ID NO: 271137 - protein, 15 aa, Artificial Sequence
  Description of Artificial Sequence: Synthetic peptide
  Seed: SIGKVCRTLLAKSVF
SIMKVLRRLLTKSVF

SEQ ID NO: 271138 - protein, 15 aa, Artificial Sequence
  Description of Artificial Sequence: Synthetic peptide
  Seed: SIGKVCRTLLAKSVF
SIMKVLRRLLVKSVF

SEQ ID NO: 271139 - protein, 15 aa, Artificial Sequence
  Description of Artificial Sequence: Synthetic peptide
  Seed: SIGKVCRTLLAKSVF
SIMKVLRRLLWKSVF

SEQ ID NO: 271140 - protein, 15 aa, Artificial Sequence
  Description of Artificial Sequence: Synthetic peptide
  Seed: SIGKVCRTLLAKSVF
SIMKVLRRLLYKSVF

SEQ ID NO: 271141 - protein, 15 aa, Artificial Sequence
  Description of Artificial Sequence: Synthetic peptide
  Seed: SIGKVCRTLLAKSVF
SIMKVLRSLLAKSVF

SEQ ID NO: 271142 - protein, 15 aa, Artificial Sequence
  Description of Artificial Sequence: Synthetic peptide
  Seed: SIGKVCRTLLAKSVF
SIMKVLRSLLDKSVF

SEQ ID NO: 271143 - protein, 15 aa, Artificial Sequence
  Description of Artificial Sequence: Synthetic peptide
  Seed: SIGKVCRTLLAKSVF
SIMKVLRSLLEKSVF

SEQ ID NO: 271144 - protein, 15 aa, Artificial Sequence
  Description of Artificial Sequence: Synthetic peptide
  Seed: SIGKVCRTLLAKSVF
SIMKVLRSLLGKSVF

SEQ ID NO: 271145 - protein, 15 aa, Artificial Sequence
  Description of Artificial Sequence: Synthetic peptide
  Seed: SIGKVCRTLLAKSVF
SIMKVLRSLLHKSVF

SEQ ID NO: 271146 - protein, 15 aa, Artificial Sequence
  Description of Artificial Sequence: Synthetic peptide
  Seed: SIGKVCRTLLAKSVF
SIMKVLRSLLIKSVF

SEQ ID NO: 271147 - protein, 15 aa, Artificial Sequence
  Description of Artificial Sequence: Synthetic peptide
  Seed: SIGKVCRTLLAKSVF
SIMKVLRSLLMKSVF

SEQ ID NO: 271148 - protein, 15 aa, Artificial Sequence
  Description of Artificial Sequence: Synthetic peptide
  Seed: SIGKVCRTLLAKSVF
SIMKVLRSLLNKSVF

SEQ ID NO: 271149 - protein, 15 aa, Artificial Sequence
  Description of Artificial Sequence: Synthetic peptide
  Seed: SIGKVCRTLLAKSVF
SIMKVLRSLLPKSVF

SEQ ID NO: 271150 - protein, 15 aa, Artificial Sequence
  Description of Artificial Sequence: Synthetic peptide
  Seed: SIGKVCRTLLAKSVF
SIMKVLRSLLQKSVF

SEQ ID NO: 271151 - protein, 15 aa, Artificial Sequence
  Description of Artificial Sequence: Synthetic peptide
  Seed: SIGKVCRTLLAKSVF
SIMKVLRSLLRKSVF

SEQ ID NO: 271152 - protein, 15 aa, Artificial Sequence
  Description of Artificial Sequence: Synthetic peptide
  Seed: SIGKVCRTLLAKSVF
SIMKVLRSLLSKSVF

SEQ ID NO: 271153 - protein, 15 aa, Artificial Sequence
  Description of Artificial Sequence: Synthetic peptide
  Seed: SIGKVCRTLLAKSVF
SIMKVLRSLLTKSVF

SEQ ID NO: 271154 - protein, 15 aa, Artificial Sequence
  Description of Artificial Sequence: Synthetic peptide
  Seed: SIGKVCRTLLAKSVF
SIMKVLRSLLVKSVF

SEQ ID NO: 271155 - protein, 15 aa, Artificial Sequence
  Description of Artificial Sequence: Synthetic peptide
  Seed: SIGKVCRTLLAKSVF
SIMKVLRSLLYKSVF

SEQ ID NO: 271156 - protein, 15 aa, Artificial Sequence
  Description of Artificial Sequence: Synthetic peptide
  Seed: SIGKVCRTLLAKSVF
SIMKVLRTLLAKSVF

SEQ ID NO: 271157 - protein, 15 aa, Artificial Sequence
  Description of Artificial Sequence: Synthetic peptide
  Seed: SIGKVCRTLLAKSVF
SIMKVLRTLLDKSVF

SEQ ID NO: 271158 - protein, 15 aa, Artificial Sequence
  Description of Artificial Sequence: Synthetic peptide
  Seed: SIGKVCRTLLAKSVF
SIMKVLRTLLEKSVF

SEQ ID NO: 271159 - protein, 15 aa, Artificial Sequence
  Description of Artificial Sequence: Synthetic peptide
  Seed: SIGKVCRTLLAKSVF
SIMKVLRTLLGKSVF

SEQ ID NO: 271160 - protein, 15 aa, Artificial Sequence
  Description of Artificial Sequence: Synthetic peptide
  Seed: SIGKVCRTLLAKSVF
SIMKVLRTLLHKSVF

SEQ ID NO: 271161 - protein, 15 aa, Artificial Sequence
  Description of Artificial Sequence: Synthetic peptide
  Seed: SIGKVCRTLLAKSVF
SIMKVLRTLLMKSVF

SEQ ID NO: 271162 - protein, 15 aa, Artificial Sequence
  Description of Artificial Sequence: Synthetic peptide
  Seed: SIGKVCRTLLAKSVF
SIMKVLRTLLNKSVF

SEQ ID NO: 271163 - protein, 15 aa, Artificial Sequence
  Description of Artificial Sequence: Synthetic peptide
  Seed: SIGKVCRTLLAKSVF
SIMKVLRTLLPKSVF

SEQ ID NO: 271164 - protein, 15 aa, Artificial Sequence
  Description of Artificial Sequence: Synthetic peptide
  Seed: SIGKVCRTLLAKSVF
SIMKVLRTLLQKSVF

SEQ ID NO: 271165 - protein, 15 aa, Artificial Sequence
  Description of Artificial Sequence: Synthetic peptide
  Seed: SIGKVCRTLLAKSVF
SIMKVLRTLLRKSVF

SEQ ID NO: 271166 - protein, 15 aa, Artificial Sequence
  Description of Artificial Sequence: Synthetic peptide
  Seed: SIGKVCRTLLAKSVF
SIMKVLRTLLSKSVF

SEQ ID NO: 271167 - protein, 15 aa, Artificial Sequence
  Description of Artificial Sequence: Synthetic peptide
  Seed: SIGKVCRTLLAKSVF
SIMKVLRTLLTKSVF

SEQ ID NO: 271168 - protein, 15 aa, Artificial Sequence
  Description of Artificial Sequence: Synthetic peptide
  Seed: SIGKVCRTLLAKSVF
SIMKVLRTLLVKSVF

SEQ ID NO: 271169 - protein, 15 aa, Artificial Sequence
  Description of Artificial Sequence: Synthetic peptide
  Seed: SIGKVCRTLLAKSVF
SIMKVLRTLLYKSVF

SEQ ID NO: 271170 - protein, 15 aa, Artificial Sequence
  Description of Artificial Sequence: Synthetic peptide
  Seed: SIGKVCRTLLAKSVF
SIMKVLRVLLAKSVF

SEQ ID NO: 271171 - protein, 15 aa, Artificial Sequence
  Description of Artificial Sequence: Synthetic peptide
  Seed: SIGKVCRTLLAKSVF
SIMKVLRVLLGKSVF

SEQ ID NO: 271172 - protein, 15 aa, Artificial Sequence
  Description of Artificial Sequence: Synthetic peptide
  Seed: SIGKVCRTLLAKSVF
SIMKVLRVLLHKSVF

SEQ ID NO: 271173 - protein, 15 aa, Artificial Sequence
  Description of Artificial Sequence: Synthetic peptide
  Seed: SIGKVCRTLLAKSVF
SIMKVLRVLLNKSVF

SEQ ID NO: 271174 - protein, 15 aa, Artificial Sequence
  Description of Artificial Sequence: Synthetic peptide
  Seed: SIGKVCRTLLAKSVF
SIMKVLRVLLSKSVF

SEQ ID NO: 271175 - protein, 15 aa, Artificial Sequence
  Description of Artificial Sequence: Synthetic peptide
  Seed: SIGKVCRTLLAKSVF
SIMKVMRALLAKSVF

SEQ ID NO: 271176 - protein, 15 aa, Artificial Sequence
  Description of Artificial Sequence: Synthetic peptide
  Seed: SIGKVCRTLLAKSVF
SIMKVMRALLDKSVF

SEQ ID NO: 271177 - protein, 15 aa, Artificial Sequence
  Description of Artificial Sequence: Synthetic peptide
  Seed: SIGKVCRTLLAKSVF
SIMKVMRALLEKSVF

SEQ ID NO: 271178 - protein, 15 aa, Artificial Sequence
  Description of Artificial Sequence: Synthetic peptide
  Seed: SIGKVCRTLLAKSVF
SIMKVMRALLGKSVF

SEQ ID NO: 271179 - protein, 15 aa, Artificial Sequence
  Description of Artificial Sequence: Synthetic peptide
  Seed: SIGKVCRTLLAKSVF
SIMKVMRALLHKSVF

SEQ ID NO: 271180 - protein, 15 aa, Artificial Sequence
  Description of Artificial Sequence: Synthetic peptide
  Seed: SIGKVCRTLLAKSVF
SIMKVMRALLIKSVF

SEQ ID NO: 271181 - protein, 15 aa, Artificial Sequence
  Description of Artificial Sequence: Synthetic peptide
  Seed: SIGKVCRTLLAKSVF
SIMKVMRALLLKSVF

SEQ ID NO: 271182 - protein, 15 aa, Artificial Sequence
  Description of Artificial Sequence: Synthetic peptide
  Seed: SIGKVCRTLLAKSVF
SIMKVMRALLMKSVF

SEQ ID NO: 271183 - protein, 15 aa, Artificial Sequence
  Description of Artificial Sequence: Synthetic peptide
  Seed: SIGKVCRTLLAKSVF
SIMKVMRALLNKSVF

SEQ ID NO: 271184 - protein, 15 aa, Artificial Sequence
  Description of Artificial Sequence: Synthetic peptide
  Seed: SIGKVCRTLLAKSVF
SIMKVMRALLPKSVF

SEQ ID NO: 271185 - protein, 15 aa, Artificial Sequence
  Description of Artificial Sequence: Synthetic peptide
  Seed: SIGKVCRTLLAKSVF
SIMKVMRALLQKSVF

SEQ ID NO: 271186 - protein, 15 aa, Artificial Sequence
  Description of Artificial Sequence: Synthetic peptide
  Seed: SIGKVCRTLLAKSVF
SIMKVMRALLRKSVF

SEQ ID NO: 271187 - protein, 15 aa, Artificial Sequence
  Description of Artificial Sequence: Synthetic peptide
  Seed: SIGKVCRTLLAKSVF
SIMKVMRALLSKSVF

SEQ ID NO: 271188 - protein, 15 aa, Artificial Sequence
  Description of Artificial Sequence: Synthetic peptide
  Seed: SIGKVCRTLLAKSVF
SIMKVMRALLTKSVF

SEQ ID NO: 271189 - protein, 15 aa, Artificial Sequence
  Description of Artificial Sequence: Synthetic peptide
  Seed: SIGKVCRTLLAKSVF
SIMKVMRALLVKSVF

SEQ ID NO: 271190 - protein, 15 aa, Artificial Sequence
  Description of Artificial Sequence: Synthetic peptide
  Seed: SIGKVCRTLLAKSVF
SIMKVMRALLYKSVF

SEQ ID NO: 271191 - protein, 15 aa, Artificial Sequence
  Description of Artificial Sequence: Synthetic peptide
  Seed: SIGKVCRTLLAKSVF
SIMKVMRDLLAKSVF

SEQ ID NO: 271192 - protein, 15 aa, Artificial Sequence
  Description of Artificial Sequence: Synthetic peptide
  Seed: SIGKVCRTLLAKSVF
SIMKVMRDLLSKSVF

SEQ ID NO: 271193 - protein, 15 aa, Artificial Sequence
  Description of Artificial Sequence: Synthetic peptide
  Seed: SIGKVCRTLLAKSVF
SIMKVMRELLAKSVF

SEQ ID NO: 271194 - protein, 15 aa, Artificial Sequence
  Description of Artificial Sequence: Synthetic peptide
  Seed: SIGKVCRTLLAKSVF
SIMKVMRELLGKSVF

SEQ ID NO: 271195 - protein, 15 aa, Artificial Sequence
  Description of Artificial Sequence: Synthetic peptide
  Seed: SIGKVCRTLLAKSVF
SIMKVMRELLHKSVF

SEQ ID NO: 271196 - protein, 15 aa, Artificial Sequence
  Description of Artificial Sequence: Synthetic peptide
  Seed: SIGKVCRTLLAKSVF
SIMKVMRELLKKSVF

SEQ ID NO: 271197 - protein, 15 aa, Artificial Sequence
  Description of Artificial Sequence: Synthetic peptide
  Seed: SIGKVCRTLLAKSVF
SIMKVMRELLRKSVF

SEQ ID NO: 271198 - protein, 15 aa, Artificial Sequence
  Description of Artificial Sequence: Synthetic peptide
  Seed: SIGKVCRTLLAKSVF
SIMKVMRELLSKSVF

SEQ ID NO: 271199 - protein, 15 aa, Artificial Sequence
  Description of Artificial Sequence: Synthetic peptide
  Seed: SIGKVCRTLLAKSVF
SIMKVMRGLLAKSVF

SEQ ID NO: 271200 - protein, 15 aa, Artificial Sequence
  Description of Artificial Sequence: Synthetic peptide
  Seed: SIGKVCRTLLAKSVF
SIMKVMRGLLEKSVF

SEQ ID NO: 271201 - protein, 15 aa, Artificial Sequence
  Description of Artificial Sequence: Synthetic peptide
  Seed: SIGKVCRTLLAKSVF
SIMKVMRGLLGKSVF

SEQ ID NO: 271202 - protein, 15 aa, Artificial Sequence
  Description of Artificial Sequence: Synthetic peptide
  Seed: SIGKVCRTLLAKSVF
SIMKVMRGLLHKSVF

SEQ ID NO: 271203 - protein, 15 aa, Artificial Sequence
  Description of Artificial Sequence: Synthetic peptide
  Seed: SIGKVCRTLLAKSVF
SIMKVMRGLLIKSVF

SEQ ID NO: 271204 - protein, 15 aa, Artificial Sequence
  Description of Artificial Sequence: Synthetic peptide
  Seed: SIGKVCRTLLAKSVF
SIMKVMRGLLLKSVF

SEQ ID NO: 271205 - protein, 15 aa, Artificial Sequence
  Description of Artificial Sequence: Synthetic peptide
  Seed: SIGKVCRTLLAKSVF
SIMKVMRGLLMKSVF

SEQ ID NO: 271206 - protein, 15 aa, Artificial Sequence
  Description of Artificial Sequence: Synthetic peptide
  Seed: SIGKVCRTLLAKSVF
SIMKVMRGLLNKSVF

SEQ ID NO: 271207 - protein, 15 aa, Artificial Sequence
  Description of Artificial Sequence: Synthetic peptide
  Seed: SIGKVCRTLLAKSVF
SIMKVMRGLLPKSVF

SEQ ID NO: 271208 - protein, 15 aa, Artificial Sequence
  Description of Artificial Sequence: Synthetic peptide
  Seed: SIGKVCRTLLAKSVF
SIMKVMRGLLQKSVF

SEQ ID NO: 271209 - protein, 15 aa, Artificial Sequence
  Description of Artificial Sequence: Synthetic peptide
  Seed: SIGKVCRTLLAKSVF
SIMKVMRGLLSKSVF

SEQ ID NO: 271210 - protein, 15 aa, Artificial Sequence
  Description of Artificial Sequence: Synthetic peptide
  Seed: SIGKVCRTLLAKSVF
SIMKVMRGLLTKSVF

SEQ ID NO: 271211 - protein, 15 aa, Artificial Sequence
  Description of Artificial Sequence: Synthetic peptide
  Seed: SIGKVCRTLLAKSVF
SIMKVMRGLLVKSVF

SEQ ID NO: 271212 - protein, 15 aa, Artificial Sequence
  Description of Artificial Sequence: Synthetic peptide
  Seed: SIGKVCRTLLAKSVF
SIMKVMRGLLYKSVF

SEQ ID NO: 271213 - protein, 15 aa, Artificial Sequence
  Description of Artificial Sequence: Synthetic peptide
  Seed: SIGKVCRTLLAKSVF
SIMKVMRHLLAKSVF

SEQ ID NO: 271214 - protein, 15 aa, Artificial Sequence
  Description of Artificial Sequence: Synthetic peptide
  Seed: SIGKVCRTLLAKSVF
SIMKVMRHLLCKSVF

SEQ ID NO: 271215 - protein, 15 aa, Artificial Sequence
  Description of Artificial Sequence: Synthetic peptide
  Seed: SIGKVCRTLLAKSVF
SIMKVMRHLLDKSVF

SEQ ID NO: 271216 - protein, 15 aa, Artificial Sequence
  Description of Artificial Sequence: Synthetic peptide
  Seed: SIGKVCRTLLAKSVF
SIMKVMRHLLEKSVF

SEQ ID NO: 271217 - protein, 15 aa, Artificial Sequence
  Description of Artificial Sequence: Synthetic peptide
  Seed: SIGKVCRTLLAKSVF
SIMKVMRHLLFKSVF

SEQ ID NO: 271218 - protein, 15 aa, Artificial Sequence
  Description of Artificial Sequence: Synthetic peptide
  Seed: SIGKVCRTLLAKSVF
SIMKVMRHLLGKSVF

SEQ ID NO: 271219 - protein, 15 aa, Artificial Sequence
  Description of Artificial Sequence: Synthetic peptide
  Seed: SIGKVCRTLLAKSVF
SIMKVMRHLLHKSVF

SEQ ID NO: 271220 - protein, 15 aa, Artificial Sequence
  Description of Artificial Sequence: Synthetic peptide
  Seed: SIGKVCRTLLAKSVF
SIMKVMRHLLIKSVF

SEQ ID NO: 271221 - protein, 15 aa, Artificial Sequence
  Description of Artificial Sequence: Synthetic peptide
  Seed: SIGKVCRTLLAKSVF
SIMKVMRHLLKKSVF

SEQ ID NO: 271222 - protein, 15 aa, Artificial Sequence
  Description of Artificial Sequence: Synthetic peptide
  Seed: SIGKVCRTLLAKSVF
SIMKVMRHLLLKSVF

SEQ ID NO: 271223 - protein, 15 aa, Artificial Sequence
  Description of Artificial Sequence: Synthetic peptide
  Seed: SIGKVCRTLLAKSVF
SIMKVMRHLLMKSVF

SEQ ID NO: 271224 - protein, 15 aa, Artificial Sequence
  Description of Artificial Sequence: Synthetic peptide
  Seed: SIGKVCRTLLAKSVF
SIMKVMRHLLNKSVF

SEQ ID NO: 271225 - protein, 15 aa, Artificial Sequence
  Description of Artificial Sequence: Synthetic peptide
  Seed: SIGKVCRTLLAKSVF
SIMKVMRHLLPKSVF

SEQ ID NO: 271226 - protein, 15 aa, Artificial Sequence
  Description of Artificial Sequence: Synthetic peptide
  Seed: SIGKVCRTLLAKSVF
SIMKVMRHLLQKSVF

SEQ ID NO: 271227 - protein, 15 aa, Artificial Sequence
  Description of Artificial Sequence: Synthetic peptide
  Seed: SIGKVCRTLLAKSVF
SIMKVMRHLLRKSVF

SEQ ID NO: 271228 - protein, 15 aa, Artificial Sequence
  Description of Artificial Sequence: Synthetic peptide
  Seed: SIGKVCRTLLAKSVF
SIMKVMRHLLSKSVF

SEQ ID NO: 271229 - protein, 15 aa, Artificial Sequence
  Description of Artificial Sequence: Synthetic peptide
  Seed: SIGKVCRTLLAKSVF
SIMKVMRHLLTKSVF

SEQ ID NO: 271230 - protein, 15 aa, Artificial Sequence
  Description of Artificial Sequence: Synthetic peptide
  Seed: SIGKVCRTLLAKSVF
SIMKVMRHLLVKSVF

SEQ ID NO: 271231 - protein, 15 aa, Artificial Sequence
  Description of Artificial Sequence: Synthetic peptide
  Seed: SIGKVCRTLLAKSVF
SIMKVMRHLLWKSVF

SEQ ID NO: 271232 - protein, 15 aa, Artificial Sequence
  Description of Artificial Sequence: Synthetic peptide
  Seed: SIGKVCRTLLAKSVF
SIMKVMRHLLYKSVF

SEQ ID NO: 271233 - protein, 15 aa, Artificial Sequence
  Description of Artificial Sequence: Synthetic peptide
  Seed: SIGKVCRTLLAKSVF
SIMKVMRILLAKSVF

SEQ ID NO: 271234 - protein, 15 aa, Artificial Sequence
  Description of Artificial Sequence: Synthetic peptide
  Seed: SIGKVCRTLLAKSVF
SIMKVMRILLGKSVF

SEQ ID NO: 271235 - protein, 15 aa, Artificial Sequence
  Description of Artificial Sequence: Synthetic peptide
  Seed: SIGKVCRTLLAKSVF
SIMKVMRILLHKSVF

SEQ ID NO: 271236 - protein, 15 aa, Artificial Sequence
  Description of Artificial Sequence: Synthetic peptide
  Seed: SIGKVCRTLLAKSVF
SIMKVMRILLNKSVF

SEQ ID NO: 271237 - protein, 15 aa, Artificial Sequence
  Description of Artificial Sequence: Synthetic peptide
  Seed: SIGKVCRTLLAKSVF
SIMKVMRILLQKSVF

SEQ ID NO: 271238 - protein, 15 aa, Artificial Sequence
  Description of Artificial Sequence: Synthetic peptide
  Seed: SIGKVCRTLLAKSVF
SIMKVMRILLSKSVF

SEQ ID NO: 271239 - protein, 15 aa, Artificial Sequence
  Description of Artificial Sequence: Synthetic peptide
  Seed: SIGKVCRTLLAKSVF
SIMKVMRILLTKSVF

SEQ ID NO: 271240 - protein, 15 aa, Artificial Sequence
  Description of Artificial Sequence: Synthetic peptide
  Seed: SIGKVCRTLLAKSVF
SIMKVMRKLLAKSVF

SEQ ID NO: 271241 - protein, 15 aa, Artificial Sequence
  Description of Artificial Sequence: Synthetic peptide
  Seed: SIGKVCRTLLAKSVF
SIMKVMRKLLCKSVF

SEQ ID NO: 271242 - protein, 15 aa, Artificial Sequence
  Description of Artificial Sequence: Synthetic peptide
  Seed: SIGKVCRTLLAKSVF
SIMKVMRKLLDKSVF

SEQ ID NO: 271243 - protein, 15 aa, Artificial Sequence
  Description of Artificial Sequence: Synthetic peptide
  Seed: SIGKVCRTLLAKSVF
SIMKVMRKLLEKSVF

SEQ ID NO: 271244 - protein, 15 aa, Artificial Sequence
  Description of Artificial Sequence: Synthetic peptide
  Seed: SIGKVCRTLLAKSVF
SIMKVMRKLLFKSVF

SEQ ID NO: 271245 - protein, 15 aa, Artificial Sequence
  Description of Artificial Sequence: Synthetic peptide
  Seed: SIGKVCRTLLAKSVF
SIMKVMRKLLGKSVF

SEQ ID NO: 271246 - protein, 15 aa, Artificial Sequence
  Description of Artificial Sequence: Synthetic peptide
  Seed: SIGKVCRTLLAKSVF
SIMKVMRKLLHKSVF

SEQ ID NO: 271247 - protein, 15 aa, Artificial Sequence
  Description of Artificial Sequence: Synthetic peptide
  Seed: SIGKVCRTLLAKSVF
SIMKVMRKLLIKSVF

SEQ ID NO: 271248 - protein, 15 aa, Artificial Sequence
  Description of Artificial Sequence: Synthetic peptide
  Seed: SIGKVCRTLLAKSVF
SIMKVMRKLLKKSVF

SEQ ID NO: 271249 - protein, 15 aa, Artificial Sequence
  Description of Artificial Sequence: Synthetic peptide
  Seed: SIGKVCRTLLAKSVF
SIMKVMRKLLLKSVF

SEQ ID NO: 271250 - protein, 15 aa, Artificial Sequence
  Description of Artificial Sequence: Synthetic peptide
  Seed: SIGKVCRTLLAKSVF
SIMKVMRKLLMKSVF

SEQ ID NO: 271251 - protein, 15 aa, Artificial Sequence
  Description of Artificial Sequence: Synthetic peptide
  Seed: SIGKVCRTLLAKSVF
SIMKVMRKLLNKSVF

SEQ ID NO: 271252 - protein, 15 aa, Artificial Sequence
  Description of Artificial Sequence: Synthetic peptide
  Seed: SIGKVCRTLLAKSVF
SIMKVMRKLLPKSVF

SEQ ID NO: 271253 - protein, 15 aa, Artificial Sequence
  Description of Artificial Sequence: Synthetic peptide
  Seed: SIGKVCRTLLAKSVF
SIMKVMRKLLQKSVF

SEQ ID NO: 271254 - protein, 15 aa, Artificial Sequence
  Description of Artificial Sequence: Synthetic peptide
  Seed: SIGKVCRTLLAKSVF
SIMKVMRKLLRKSVF

SEQ ID NO: 271255 - protein, 15 aa, Artificial Sequence
  Description of Artificial Sequence: Synthetic peptide
  Seed: SIGKVCRTLLAKSVF
SIMKVMRKLLSKSVF

SEQ ID NO: 271256 - protein, 15 aa, Artificial Sequence
  Description of Artificial Sequence: Synthetic peptide
  Seed: SIGKVCRTLLAKSVF
SIMKVMRKLLTKSVF

SEQ ID NO: 271257 - protein, 15 aa, Artificial Sequence
  Description of Artificial Sequence: Synthetic peptide
  Seed: SIGKVCRTLLAKSVF
SIMKVMRKLLVKSVF

SEQ ID NO: 271258 - protein, 15 aa, Artificial Sequence
  Description of Artificial Sequence: Synthetic peptide
  Seed: SIGKVCRTLLAKSVF
SIMKVMRKLLWKSVF

SEQ ID NO: 271259 - protein, 15 aa, Artificial Sequence
  Description of Artificial Sequence: Synthetic peptide
  Seed: SIGKVCRTLLAKSVF
SIMKVMRKLLYKSVF

SEQ ID NO: 271260 - protein, 15 aa, Artificial Sequence
  Description of Artificial Sequence: Synthetic peptide
  Seed: SIGKVCRTLLAKSVF
SIMKVMRLLLGKSVF

SEQ ID NO: 271261 - protein, 15 aa, Artificial Sequence
  Description of Artificial Sequence: Synthetic peptide
  Seed: SIGKVCRTLLAKSVF
SIMKVMRLLLHKSVF

SEQ ID NO: 271262 - protein, 15 aa, Artificial Sequence
  Description of Artificial Sequence: Synthetic peptide
  Seed: SIGKVCRTLLAKSVF
SIMKVMRLLLNKSVF

SEQ ID NO: 271263 - protein, 15 aa, Artificial Sequence
  Description of Artificial Sequence: Synthetic peptide
  Seed: SIGKVCRTLLAKSVF
SIMKVMRLLLQKSVF

SEQ ID NO: 271264 - protein, 15 aa, Artificial Sequence
  Description of Artificial Sequence: Synthetic peptide
  Seed: SIGKVCRTLLAKSVF
SIMKVMRLLLSKSVF

SEQ ID NO: 271265 - protein, 15 aa, Artificial Sequence
  Description of Artificial Sequence: Synthetic peptide
  Seed: SIGKVCRTLLAKSVF
SIMKVMRMLLAKSVF

SEQ ID NO: 271266 - protein, 15 aa, Artificial Sequence
  Description of Artificial Sequence: Synthetic peptide
  Seed: SIGKVCRTLLAKSVF
SIMKVMRMLLGKSVF

SEQ ID NO: 271267 - protein, 15 aa, Artificial Sequence
  Description of Artificial Sequence: Synthetic peptide
  Seed: SIGKVCRTLLAKSVF
SIMKVMRMLLQKSVF

SEQ ID NO: 271268 - protein, 15 aa, Artificial Sequence
  Description of Artificial Sequence: Synthetic peptide
  Seed: SIGKVCRTLLAKSVF
SIMKVMRMLLSKSVF

SEQ ID NO: 271269 - protein, 15 aa, Artificial Sequence
  Description of Artificial Sequence: Synthetic peptide
  Seed: SIGKVCRTLLAKSVF
SIMKVMRNLLAKSVF

SEQ ID NO: 271270 - protein, 15 aa, Artificial Sequence
  Description of Artificial Sequence: Synthetic peptide
  Seed: SIGKVCRTLLAKSVF
SIMKVMRNLLDKSVF

SEQ ID NO: 271271 - protein, 15 aa, Artificial Sequence
  Description of Artificial Sequence: Synthetic peptide
  Seed: SIGKVCRTLLAKSVF
SIMKVMRNLLEKSVF

SEQ ID NO: 271272 - protein, 15 aa, Artificial Sequence
  Description of Artificial Sequence: Synthetic peptide
  Seed: SIGKVCRTLLAKSVF
SIMKVMRNLLGKSVF

SEQ ID NO: 271273 - protein, 15 aa, Artificial Sequence
  Description of Artificial Sequence: Synthetic peptide
  Seed: SIGKVCRTLLAKSVF
SIMKVMRNLLHKSVF

SEQ ID NO: 271274 - protein, 15 aa, Artificial Sequence
  Description of Artificial Sequence: Synthetic peptide
  Seed: SIGKVCRTLLAKSVF
SIMKVMRNLLIKSVF

SEQ ID NO: 271275 - protein, 15 aa, Artificial Sequence
  Description of Artificial Sequence: Synthetic peptide
  Seed: SIGKVCRTLLAKSVF
SIMKVMRNLLKKSVF

SEQ ID NO: 271276 - protein, 15 aa, Artificial Sequence
  Description of Artificial Sequence: Synthetic peptide
  Seed: SIGKVCRTLLAKSVF
SIMKVMRNLLLKSVF

SEQ ID NO: 271277 - protein, 15 aa, Artificial Sequence
  Description of Artificial Sequence: Synthetic peptide
  Seed: SIGKVCRTLLAKSVF
SIMKVMRNLLMKSVF

SEQ ID NO: 271278 - protein, 15 aa, Artificial Sequence
  Description of Artificial Sequence: Synthetic peptide
  Seed: SIGKVCRTLLAKSVF
SIMKVMRNLLNKSVF

SEQ ID NO: 271279 - protein, 15 aa, Artificial Sequence
  Description of Artificial Sequence: Synthetic peptide
  Seed: SIGKVCRTLLAKSVF
SIMKVMRNLLPKSVF

SEQ ID NO: 271280 - protein, 15 aa, Artificial Sequence
  Description of Artificial Sequence: Synthetic peptide
  Seed: SIGKVCRTLLAKSVF
SIMKVMRNLLQKSVF

SEQ ID NO: 271281 - protein, 15 aa, Artificial Sequence
  Description of Artificial Sequence: Synthetic peptide
  Seed: SIGKVCRTLLAKSVF
SIMKVMRNLLRKSVF

SEQ ID NO: 271282 - protein, 15 aa, Artificial Sequence
  Description of Artificial Sequence: Synthetic peptide
  Seed: SIGKVCRTLLAKSVF
SIMKVMRNLLSKSVF

SEQ ID NO: 271283 - protein, 15 aa, Artificial Sequence
  Description of Artificial Sequence: Synthetic peptide
  Seed: SIGKVCRTLLAKSVF
SIMKVMRNLLTKSVF

SEQ ID NO: 271284 - protein, 15 aa, Artificial Sequence
  Description of Artificial Sequence: Synthetic peptide
  Seed: SIGKVCRTLLAKSVF
SIMKVMRNLLVKSVF

SEQ ID NO: 271285 - protein, 15 aa, Artificial Sequence
  Description of Artificial Sequence: Synthetic peptide
  Seed: SIGKVCRTLLAKSVF
SIMKVMRNLLYKSVF

SEQ ID NO: 271286 - protein, 15 aa, Artificial Sequence
  Description of Artificial Sequence: Synthetic peptide
  Seed: SIGKVCRTLLAKSVF
SIMKVMRPLLAKSVF

SEQ ID NO: 271287 - protein, 15 aa, Artificial Sequence
  Description of Artificial Sequence: Synthetic peptide
  Seed: SIGKVCRTLLAKSVF
SIMKVMRPLLEKSVF

SEQ ID NO: 271288 - protein, 15 aa, Artificial Sequence
  Description of Artificial Sequence: Synthetic peptide
  Seed: SIGKVCRTLLAKSVF
SIMKVMRPLLFKSVF

SEQ ID NO: 271289 - protein, 15 aa, Artificial Sequence
  Description of Artificial Sequence: Synthetic peptide
  Seed: SIGKVCRTLLAKSVF
SIMKVMRPLLGKSVF

SEQ ID NO: 271290 - protein, 15 aa, Artificial Sequence
  Description of Artificial Sequence: Synthetic peptide
  Seed: SIGKVCRTLLAKSVF
SIMKVMRPLLHKSVF

SEQ ID NO: 271291 - protein, 15 aa, Artificial Sequence
  Description of Artificial Sequence: Synthetic peptide
  Seed: SIGKVCRTLLAKSVF
SIMKVMRPLLIKSVF

SEQ ID NO: 271292 - protein, 15 aa, Artificial Sequence
  Description of Artificial Sequence: Synthetic peptide
  Seed: SIGKVCRTLLAKSVF
SIMKVMRPLLLKSVF

SEQ ID NO: 271293 - protein, 15 aa, Artificial Sequence
  Description of Artificial Sequence: Synthetic peptide
  Seed: SIGKVCRTLLAKSVF
SIMKVMRPLLMKSVF

SEQ ID NO: 271294 - protein, 15 aa, Artificial Sequence
  Description of Artificial Sequence: Synthetic peptide
  Seed: SIGKVCRTLLAKSVF
SIMKVMRPLLNKSVF

SEQ ID NO: 271295 - protein, 15 aa, Artificial Sequence
  Description of Artificial Sequence: Synthetic peptide
  Seed: SIGKVCRTLLAKSVF
SIMKVMRPLLPKSVF

SEQ ID NO: 271296 - protein, 15 aa, Artificial Sequence
  Description of Artificial Sequence: Synthetic peptide
  Seed: SIGKVCRTLLAKSVF
SIMKVMRPLLQKSVF

SEQ ID NO: 271297 - protein, 15 aa, Artificial Sequence
  Description of Artificial Sequence: Synthetic peptide
  Seed: SIGKVCRTLLAKSVF
SIMKVMRPLLSKSVF

SEQ ID NO: 271298 - protein, 15 aa, Artificial Sequence
  Description of Artificial Sequence: Synthetic peptide
  Seed: SIGKVCRTLLAKSVF
SIMKVMRPLLTKSVF

SEQ ID NO: 271299 - protein, 15 aa, Artificial Sequence
  Description of Artificial Sequence: Synthetic peptide
  Seed: SIGKVCRTLLAKSVF
SIMKVMRPLLVKSVF

SEQ ID NO: 271300 - protein, 15 aa, Artificial Sequence
  Description of Artificial Sequence: Synthetic peptide
  Seed: SIGKVCRTLLAKSVF
SIMKVMRPLLWKSVF

SEQ ID NO: 271301 - protein, 15 aa, Artificial Sequence
  Description of Artificial Sequence: Synthetic peptide
  Seed: SIGKVCRTLLAKSVF
SIMKVMRPLLYKSVF

SEQ ID NO: 271302 - protein, 15 aa, Artificial Sequence
  Description of Artificial Sequence: Synthetic peptide
  Seed: SIGKVCRTLLAKSVF
SIMKVMRQLLAKSVF

SEQ ID NO: 271303 - protein, 15 aa, Artificial Sequence
  Description of Artificial Sequence: Synthetic peptide
  Seed: SIGKVCRTLLAKSVF
SIMKVMRQLLGKSVF

SEQ ID NO: 271304 - protein, 15 aa, Artificial Sequence
  Description of Artificial Sequence: Synthetic peptide
  Seed: SIGKVCRTLLAKSVF
SIMKVMRQLLHKSVF

SEQ ID NO: 271305 - protein, 15 aa, Artificial Sequence
  Description of Artificial Sequence: Synthetic peptide
  Seed: SIGKVCRTLLAKSVF
SIMKVMRQLLNKSVF

SEQ ID NO: 271306 - protein, 15 aa, Artificial Sequence
  Description of Artificial Sequence: Synthetic peptide
  Seed: SIGKVCRTLLAKSVF
SIMKVMRQLLPKSVF

SEQ ID NO: 271307 - protein, 15 aa, Artificial Sequence
  Description of Artificial Sequence: Synthetic peptide
  Seed: SIGKVCRTLLAKSVF
SIMKVMRQLLQKSVF

SEQ ID NO: 271308 - protein, 15 aa, Artificial Sequence
  Description of Artificial Sequence: Synthetic peptide
  Seed: SIGKVCRTLLAKSVF
SIMKVMRQLLRKSVF

SEQ ID NO: 271309 - protein, 15 aa, Artificial Sequence
  Description of Artificial Sequence: Synthetic peptide
  Seed: SIGKVCRTLLAKSVF
SIMKVMRQLLSKSVF

SEQ ID NO: 271310 - protein, 15 aa, Artificial Sequence
  Description of Artificial Sequence: Synthetic peptide
  Seed: SIGKVCRTLLAKSVF
SIMKVMRQLLTKSVF

SEQ ID NO: 271311 - protein, 15 aa, Artificial Sequence
  Description of Artificial Sequence: Synthetic peptide
  Seed: SIGKVCRTLLAKSVF
SIMKVMRQLLVKSVF

SEQ ID NO: 271312 - protein, 15 aa, Artificial Sequence
  Description of Artificial Sequence: Synthetic peptide
  Seed: SIGKVCRTLLAKSVF
SIMKVMRRLLAKSVF

SEQ ID NO: 271313 - protein, 15 aa, Artificial Sequence
  Description of Artificial Sequence: Synthetic peptide
  Seed: SIGKVCRTLLAKSVF
SIMKVMRRLLCKSVF

SEQ ID NO: 271314 - protein, 15 aa, Artificial Sequence
  Description of Artificial Sequence: Synthetic peptide
  Seed: SIGKVCRTLLAKSVF
SIMKVMRRLLDKSVF

SEQ ID NO: 271315 - protein, 15 aa, Artificial Sequence
  Description of Artificial Sequence: Synthetic peptide
  Seed: SIGKVCRTLLAKSVF
SIMKVMRRLLEKSVF

SEQ ID NO: 271316 - protein, 15 aa, Artificial Sequence
  Description of Artificial Sequence: Synthetic peptide
  Seed: SIGKVCRTLLAKSVF
SIMKVMRRLLFKSVF

SEQ ID NO: 271317 - protein, 15 aa, Artificial Sequence
  Description of Artificial Sequence: Synthetic peptide
  Seed: SIGKVCRTLLAKSVF
SIMKVMRRLLGKSVF

SEQ ID NO: 271318 - protein, 15 aa, Artificial Sequence
  Description of Artificial Sequence: Synthetic peptide
  Seed: SIGKVCRTLLAKSVF
SIMKVMRRLLHKSVF

SEQ ID NO: 271319 - protein, 15 aa, Artificial Sequence
  Description of Artificial Sequence: Synthetic peptide
  Seed: SIGKVCRTLLAKSVF
SIMKVMRRLLIKSVF

SEQ ID NO: 271320 - protein, 15 aa, Artificial Sequence
  Description of Artificial Sequence: Synthetic peptide
  Seed: SIGKVCRTLLAKSVF
SIMKVMRRLLKKSVF

SEQ ID NO: 271321 - protein, 15 aa, Artificial Sequence
  Description of Artificial Sequence: Synthetic peptide
  Seed: SIGKVCRTLLAKSVF
SIMKVMRRLLLKSVF

SEQ ID NO: 271322 - protein, 15 aa, Artificial Sequence
  Description of Artificial Sequence: Synthetic peptide
  Seed: SIGKVCRTLLAKSVF
SIMKVMRRLLMKSVF

SEQ ID NO: 271323 - protein, 15 aa, Artificial Sequence
  Description of Artificial Sequence: Synthetic peptide
  Seed: SIGKVCRTLLAKSVF
SIMKVMRRLLNKSVF

SEQ ID NO: 271324 - protein, 15 aa, Artificial Sequence
  Description of Artificial Sequence: Synthetic peptide
  Seed: SIGKVCRTLLAKSVF
SIMKVMRRLLPKSVF

SEQ ID NO: 271325 - protein, 15 aa, Artificial Sequence
  Description of Artificial Sequence: Synthetic peptide
  Seed: SIGKVCRTLLAKSVF
SIMKVMRRLLQKSVF

SEQ ID NO: 271326 - protein, 15 aa, Artificial Sequence
  Description of Artificial Sequence: Synthetic peptide
  Seed: SIGKVCRTLLAKSVF
SIMKVMRRLLRKSVF

SEQ ID NO: 271327 - protein, 15 aa, Artificial Sequence
  Description of Artificial Sequence: Synthetic peptide
  Seed: SIGKVCRTLLAKSVF
SIMKVMRRLLSKSVF

SEQ ID NO: 271328 - protein, 15 aa, Artificial Sequence
  Description of Artificial Sequence: Synthetic peptide
  Seed: SIGKVCRTLLAKSVF
SIMKVMRRLLTKSVF

SEQ ID NO: 271329 - protein, 15 aa, Artificial Sequence
  Description of Artificial Sequence: Synthetic peptide
  Seed: SIGKVCRTLLAKSVF
SIMKVMRRLLVKSVF

SEQ ID NO: 271330 - protein, 15 aa, Artificial Sequence
  Description of Artificial Sequence: Synthetic peptide
  Seed: SIGKVCRTLLAKSVF
SIMKVMRRLLWKSVF

SEQ ID NO: 271331 - protein, 15 aa, Artificial Sequence
  Description of Artificial Sequence: Synthetic peptide
  Seed: SIGKVCRTLLAKSVF
SIMKVMRRLLYKSVF

SEQ ID NO: 271332 - protein, 15 aa, Artificial Sequence
  Description of Artificial Sequence: Synthetic peptide
  Seed: SIGKVCRTLLAKSVF
SIMKVMRSLLAKSVF

SEQ ID NO: 271333 - protein, 15 aa, Artificial Sequence
  Description of Artificial Sequence: Synthetic peptide
  Seed: SIGKVCRTLLAKSVF
SIMKVMRSLLDKSVF

SEQ ID NO: 271334 - protein, 15 aa, Artificial Sequence
  Description of Artificial Sequence: Synthetic peptide
  Seed: SIGKVCRTLLAKSVF
SIMKVMRSLLEKSVF

SEQ ID NO: 271335 - protein, 15 aa, Artificial Sequence
  Description of Artificial Sequence: Synthetic peptide
  Seed: SIGKVCRTLLAKSVF
SIMKVMRSLLGKSVF

SEQ ID NO: 271336 - protein, 15 aa, Artificial Sequence
  Description of Artificial Sequence: Synthetic peptide
  Seed: SIGKVCRTLLAKSVF
SIMKVMRSLLHKSVF

SEQ ID NO: 271337 - protein, 15 aa, Artificial Sequence
  Description of Artificial Sequence: Synthetic peptide
  Seed: SIGKVCRTLLAKSVF
SIMKVMRSLLIKSVF

SEQ ID NO: 271338 - protein, 15 aa, Artificial Sequence
  Description of Artificial Sequence: Synthetic peptide
  Seed: SIGKVCRTLLAKSVF
SIMKVMRSLLLKSVF

SEQ ID NO: 271339 - protein, 15 aa, Artificial Sequence
  Description of Artificial Sequence: Synthetic peptide
  Seed: SIGKVCRTLLAKSVF
SIMKVMRSLLMKSVF

SEQ ID NO: 271340 - protein, 15 aa, Artificial Sequence
  Description of Artificial Sequence: Synthetic peptide
  Seed: SIGKVCRTLLAKSVF
SIMKVMRSLLNKSVF

SEQ ID NO: 271341 - protein, 15 aa, Artificial Sequence
  Description of Artificial Sequence: Synthetic peptide
  Seed: SIGKVCRTLLAKSVF
SIMKVMRSLLPKSVF

SEQ ID NO: 271342 - protein, 15 aa, Artificial Sequence
  Description of Artificial Sequence: Synthetic peptide
  Seed: SIGKVCRTLLAKSVF
SIMKVMRSLLQKSVF

SEQ ID NO: 271343 - protein, 15 aa, Artificial Sequence
  Description of Artificial Sequence: Synthetic peptide
  Seed: SIGKVCRTLLAKSVF
SIMKVMRSLLRKSVF

SEQ ID NO: 271344 - protein, 15 aa, Artificial Sequence
  Description of Artificial Sequence: Synthetic peptide
  Seed: SIGKVCRTLLAKSVF
SIMKVMRSLLSKSVF

SEQ ID NO: 271345 - protein, 15 aa, Artificial Sequence
  Description of Artificial Sequence: Synthetic peptide
  Seed: SIGKVCRTLLAKSVF
SIMKVMRSLLTKSVF

SEQ ID NO: 271346 - protein, 15 aa, Artificial Sequence
  Description of Artificial Sequence: Synthetic peptide
  Seed: SIGKVCRTLLAKSVF
SIMKVMRSLLVKSVF

SEQ ID NO: 271347 - protein, 15 aa, Artificial Sequence
  Description of Artificial Sequence: Synthetic peptide
  Seed: SIGKVCRTLLAKSVF
SIMKVMRSLLYKSVF

SEQ ID NO: 271348 - protein, 15 aa, Artificial Sequence
  Description of Artificial Sequence: Synthetic peptide
  Seed: SIGKVCRTLLAKSVF
SIMKVMRTLLAKSVF

SEQ ID NO: 271349 - protein, 15 aa, Artificial Sequence
  Description of Artificial Sequence: Synthetic peptide
  Seed: SIGKVCRTLLAKSVF
SIMKVMRTLLDKSVF

SEQ ID NO: 271350 - protein, 15 aa, Artificial Sequence
  Description of Artificial Sequence: Synthetic peptide
  Seed: SIGKVCRTLLAKSVF
SIMKVMRTLLEKSVF

SEQ ID NO: 271351 - protein, 15 aa, Artificial Sequence
  Description of Artificial Sequence: Synthetic peptide
  Seed: SIGKVCRTLLAKSVF
SIMKVMRTLLGKSVF

SEQ ID NO: 271352 - protein, 15 aa, Artificial Sequence
  Description of Artificial Sequence: Synthetic peptide
  Seed: SIGKVCRTLLAKSVF
SIMKVMRTLLHKSVF

SEQ ID NO: 271353 - protein, 15 aa, Artificial Sequence
  Description of Artificial Sequence: Synthetic peptide
  Seed: SIGKVCRTLLAKSVF
SIMKVMRTLLIKSVF

SEQ ID NO: 271354 - protein, 15 aa, Artificial Sequence
  Description of Artificial Sequence: Synthetic peptide
  Seed: SIGKVCRTLLAKSVF
SIMKVMRTLLKKSVF

SEQ ID NO: 271355 - protein, 15 aa, Artificial Sequence
  Description of Artificial Sequence: Synthetic peptide
  Seed: SIGKVCRTLLAKSVF
SIMKVMRTLLLKSVF

SEQ ID NO: 271356 - protein, 15 aa, Artificial Sequence
  Description of Artificial Sequence: Synthetic peptide
  Seed: SIGKVCRTLLAKSVF
SIMKVMRTLLMKSVF

SEQ ID NO: 271357 - protein, 15 aa, Artificial Sequence
  Description of Artificial Sequence: Synthetic peptide
  Seed: SIGKVCRTLLAKSVF
SIMKVMRTLLNKSVF

SEQ ID NO: 271358 - protein, 15 aa, Artificial Sequence
  Description of Artificial Sequence: Synthetic peptide
  Seed: SIGKVCRTLLAKSVF
SIMKVMRTLLPKSVF

SEQ ID NO: 271359 - protein, 15 aa, Artificial Sequence
  Description of Artificial Sequence: Synthetic peptide
  Seed: SIGKVCRTLLAKSVF
SIMKVMRTLLQKSVF

SEQ ID NO: 271360 - protein, 15 aa, Artificial Sequence
  Description of Artificial Sequence: Synthetic peptide
  Seed: SIGKVCRTLLAKSVF
SIMKVMRTLLRKSVF

SEQ ID NO: 271361 - protein, 15 aa, Artificial Sequence
  Description of Artificial Sequence: Synthetic peptide
  Seed: SIGKVCRTLLAKSVF
SIMKVMRTLLSKSVF

SEQ ID NO: 271362 - protein, 15 aa, Artificial Sequence
  Description of Artificial Sequence: Synthetic peptide
  Seed: SIGKVCRTLLAKSVF
SIMKVMRTLLTKSVF

SEQ ID NO: 271363 - protein, 15 aa, Artificial Sequence
  Description of Artificial Sequence: Synthetic peptide
  Seed: SIGKVCRTLLAKSVF
SIMKVMRTLLVKSVF

SEQ ID NO: 271364 - protein, 15 aa, Artificial Sequence
  Description of Artificial Sequence: Synthetic peptide
  Seed: SIGKVCRTLLAKSVF
SIMKVMRTLLYKSVF

SEQ ID NO: 271365 - protein, 15 aa, Artificial Sequence
  Description of Artificial Sequence: Synthetic peptide
  Seed: SIGKVCRTLLAKSVF
SIMKVMRVLLAKSVF

SEQ ID NO: 271366 - protein, 15 aa, Artificial Sequence
  Description of Artificial Sequence: Synthetic peptide
  Seed: SIGKVCRTLLAKSVF
SIMKVMRVLLDKSVF

SEQ ID NO: 271367 - protein, 15 aa, Artificial Sequence
  Description of Artificial Sequence: Synthetic peptide
  Seed: SIGKVCRTLLAKSVF
SIMKVMRVLLGKSVF

SEQ ID NO: 271368 - protein, 15 aa, Artificial Sequence
  Description of Artificial Sequence: Synthetic peptide
  Seed: SIGKVCRTLLAKSVF
SIMKVMRVLLHKSVF

SEQ ID NO: 271369 - protein, 15 aa, Artificial Sequence
  Description of Artificial Sequence: Synthetic peptide
  Seed: SIGKVCRTLLAKSVF
SIMKVMRVLLNKSVF

SEQ ID NO: 271370 - protein, 15 aa, Artificial Sequence
  Description of Artificial Sequence: Synthetic peptide
  Seed: SIGKVCRTLLAKSVF
SIMKVMRVLLPKSVF

SEQ ID NO: 271371 - protein, 15 aa, Artificial Sequence
  Description of Artificial Sequence: Synthetic peptide
  Seed: SIGKVCRTLLAKSVF
SIMKVMRVLLQKSVF

SEQ ID NO: 271372 - protein, 15 aa, Artificial Sequence
  Description of Artificial Sequence: Synthetic peptide
  Seed: SIGKVCRTLLAKSVF
SIMKVMRVLLRKSVF

SEQ ID NO: 271373 - protein, 15 aa, Artificial Sequence
  Description of Artificial Sequence: Synthetic peptide
  Seed: SIGKVCRTLLAKSVF
SIMKVMRVLLSKSVF

SEQ ID NO: 271374 - protein, 15 aa, Artificial Sequence
  Description of Artificial Sequence: Synthetic peptide
  Seed: SIGKVCRTLLAKSVF
SIMKVMRVLLTKSVF

SEQ ID NO: 271375 - protein, 15 aa, Artificial Sequence
  Description of Artificial Sequence: Synthetic peptide
  Seed: SIGKVCRTLLAKSVF
SIMKVMRYLLAKSVF

SEQ ID NO: 271376 - protein, 15 aa, Artificial Sequence
  Description of Artificial Sequence: Synthetic peptide
  Seed: SIGKVCRTLLAKSVF
SIMKVMRYLLGKSVF

SEQ ID NO: 271377 - protein, 15 aa, Artificial Sequence
  Description of Artificial Sequence: Synthetic peptide
  Seed: SIGKVCRTLLAKSVF
SIMKVMRYLLSKSVF

SEQ ID NO: 271378 - protein, 15 aa, Artificial Sequence
  Description of Artificial Sequence: Synthetic peptide
  Seed: SIGKVCRTLLAKSVF
SIMKVNRALLAKSVF

SEQ ID NO: 271379 - protein, 15 aa, Artificial Sequence
  Description of Artificial Sequence: Synthetic peptide
  Seed: SIGKVCRTLLAKSVF
SIMKVNRALLGKSVF

SEQ ID NO: 271380 - protein, 15 aa, Artificial Sequence
  Description of Artificial Sequence: Synthetic peptide
  Seed: SIGKVCRTLLAKSVF
SIMKVNRALLQKSVF

SEQ ID NO: 271381 - protein, 15 aa, Artificial Sequence
  Description of Artificial Sequence: Synthetic peptide
  Seed: SIGKVCRTLLAKSVF
SIMKVNRALLRKSVF

SEQ ID NO: 271382 - protein, 15 aa, Artificial Sequence
  Description of Artificial Sequence: Synthetic peptide
  Seed: SIGKVCRTLLAKSVF
SIMKVNRALLSKSVF

SEQ ID NO: 271383 - protein, 15 aa, Artificial Sequence
  Description of Artificial Sequence: Synthetic peptide
  Seed: SIGKVCRTLLAKSVF
SIMKVNRALLYKSVF

SEQ ID NO: 271384 - protein, 15 aa, Artificial Sequence
  Description of Artificial Sequence: Synthetic peptide
  Seed: SIGKVCRTLLAKSVF
SIMKVNRGLLAKSVF

SEQ ID NO: 271385 - protein, 15 aa, Artificial Sequence
  Description of Artificial Sequence: Synthetic peptide
  Seed: SIGKVCRTLLAKSVF
SIMKVNRHLLAKSVF

SEQ ID NO: 271386 - protein, 15 aa, Artificial Sequence
  Description of Artificial Sequence: Synthetic peptide
  Seed: SIGKVCRTLLAKSVF
SIMKVNRHLLQKSVF

SEQ ID NO: 271387 - protein, 15 aa, Artificial Sequence
  Description of Artificial Sequence: Synthetic peptide
  Seed: SIGKVCRTLLAKSVF
SIMKVNRHLLSKSVF

SEQ ID NO: 271388 - protein, 15 aa, Artificial Sequence
  Description of Artificial Sequence: Synthetic peptide
  Seed: SIGKVCRTLLAKSVF
SIMKVNRILLAKSVF

SEQ ID NO: 271389 - protein, 15 aa, Artificial Sequence
  Description of Artificial Sequence: Synthetic peptide
  Seed: SIGKVCRTLLAKSVF
SIMKVNRILLSKSVF

SEQ ID NO: 271390 - protein, 15 aa, Artificial Sequence
  Description of Artificial Sequence: Synthetic peptide
  Seed: SIGKVCRTLLAKSVF
SIMKVNRKLLAKSVF

SEQ ID NO: 271391 - protein, 15 aa, Artificial Sequence
  Description of Artificial Sequence: Synthetic peptide
  Seed: SIGKVCRTLLAKSVF
SIMKVNRKLLCKSVF

SEQ ID NO: 271392 - protein, 15 aa, Artificial Sequence
  Description of Artificial Sequence: Synthetic peptide
  Seed: SIGKVCRTLLAKSVF
SIMKVNRKLLFKSVF

SEQ ID NO: 271393 - protein, 15 aa, Artificial Sequence
  Description of Artificial Sequence: Synthetic peptide
  Seed: SIGKVCRTLLAKSVF
SIMKVNRKLLGKSVF

SEQ ID NO: 271394 - protein, 15 aa, Artificial Sequence
  Description of Artificial Sequence: Synthetic peptide
  Seed: SIGKVCRTLLAKSVF
SIMKVNRKLLHKSVF

SEQ ID NO: 271395 - protein, 15 aa, Artificial Sequence
  Description of Artificial Sequence: Synthetic peptide
  Seed: SIGKVCRTLLAKSVF
SIMKVNRKLLIKSVF

SEQ ID NO: 271396 - protein, 15 aa, Artificial Sequence
  Description of Artificial Sequence: Synthetic peptide
  Seed: SIGKVCRTLLAKSVF
SIMKVNRKLLKKSVF

SEQ ID NO: 271397 - protein, 15 aa, Artificial Sequence
  Description of Artificial Sequence: Synthetic peptide
  Seed: SIGKVCRTLLAKSVF
SIMKVNRKLLLKSVF

SEQ ID NO: 271398 - protein, 15 aa, Artificial Sequence
  Description of Artificial Sequence: Synthetic peptide
  Seed: SIGKVCRTLLAKSVF
SIMKVNRKLLMKSVF

SEQ ID NO: 271399 - protein, 15 aa, Artificial Sequence
  Description of Artificial Sequence: Synthetic peptide
  Seed: SIGKVCRTLLAKSVF
SIMKVNRKLLNKSVF

SEQ ID NO: 271400 - protein, 15 aa, Artificial Sequence
  Description of Artificial Sequence: Synthetic peptide
  Seed: SIGKVCRTLLAKSVF
SIMKVNRKLLPKSVF

SEQ ID NO: 271401 - protein, 15 aa, Artificial Sequence
  Description of Artificial Sequence: Synthetic peptide
  Seed: SIGKVCRTLLAKSVF
SIMKVNRKLLQKSVF

SEQ ID NO: 271402 - protein, 15 aa, Artificial Sequence
  Description of Artificial Sequence: Synthetic peptide
  Seed: SIGKVCRTLLAKSVF
SIMKVNRKLLRKSVF

SEQ ID NO: 271403 - protein, 15 aa, Artificial Sequence
  Description of Artificial Sequence: Synthetic peptide
  Seed: SIGKVCRTLLAKSVF
SIMKVNRKLLSKSVF

SEQ ID NO: 271404 - protein, 15 aa, Artificial Sequence
  Description of Artificial Sequence: Synthetic peptide
  Seed: SIGKVCRTLLAKSVF
SIMKVNRKLLTKSVF

SEQ ID NO: 271405 - protein, 15 aa, Artificial Sequence
  Description of Artificial Sequence: Synthetic peptide
  Seed: SIGKVCRTLLAKSVF
SIMKVNRKLLVKSVF

SEQ ID NO: 271406 - protein, 15 aa, Artificial Sequence
  Description of Artificial Sequence: Synthetic peptide
  Seed: SIGKVCRTLLAKSVF
SIMKVNRKLLWKSVF

SEQ ID NO: 271407 - protein, 15 aa, Artificial Sequence
  Description of Artificial Sequence: Synthetic peptide
  Seed: SIGKVCRTLLAKSVF
SIMKVNRKLLYKSVF

SEQ ID NO: 271408 - protein, 15 aa, Artificial Sequence
  Description of Artificial Sequence: Synthetic peptide
  Seed: SIGKVCRTLLAKSVF
SIMKVNRNLLAKSVF

SEQ ID NO: 271409 - protein, 15 aa, Artificial Sequence
  Description of Artificial Sequence: Synthetic peptide
  Seed: SIGKVCRTLLAKSVF
SIMKVNRRLLAKSVF

SEQ ID NO: 271410 - protein, 15 aa, Artificial Sequence
  Description of Artificial Sequence: Synthetic peptide
  Seed: SIGKVCRTLLAKSVF
SIMKVNRRLLCKSVF

SEQ ID NO: 271411 - protein, 15 aa, Artificial Sequence
  Description of Artificial Sequence: Synthetic peptide
  Seed: SIGKVCRTLLAKSVF
SIMKVNRRLLDKSVF

SEQ ID NO: 271412 - protein, 15 aa, Artificial Sequence
  Description of Artificial Sequence: Synthetic peptide
  Seed: SIGKVCRTLLAKSVF
SIMKVNRRLLEKSVF

SEQ ID NO: 271413 - protein, 15 aa, Artificial Sequence
  Description of Artificial Sequence: Synthetic peptide
  Seed: SIGKVCRTLLAKSVF
SIMKVNRRLLFKSVF

SEQ ID NO: 271414 - protein, 15 aa, Artificial Sequence
  Description of Artificial Sequence: Synthetic peptide
  Seed: SIGKVCRTLLAKSVF
SIMKVNRRLLGKSVF

SEQ ID NO: 271415 - protein, 15 aa, Artificial Sequence
  Description of Artificial Sequence: Synthetic peptide
  Seed: SIGKVCRTLLAKSVF
SIMKVNRRLLHKSVF

SEQ ID NO: 271416 - protein, 15 aa, Artificial Sequence
  Description of Artificial Sequence: Synthetic peptide
  Seed: SIGKVCRTLLAKSVF
SIMKVNRRLLIKSVF

SEQ ID NO: 271417 - protein, 15 aa, Artificial Sequence
  Description of Artificial Sequence: Synthetic peptide
  Seed: SIGKVCRTLLAKSVF
SIMKVNRRLLKKSVF

SEQ ID NO: 271418 - protein, 15 aa, Artificial Sequence
  Description of Artificial Sequence: Synthetic peptide
  Seed: SIGKVCRTLLAKSVF
SIMKVNRRLLLKSVF

SEQ ID NO: 271419 - protein, 15 aa, Artificial Sequence
  Description of Artificial Sequence: Synthetic peptide
  Seed: SIGKVCRTLLAKSVF
SIMKVNRRLLMKSVF

SEQ ID NO: 271420 - protein, 15 aa, Artificial Sequence
  Description of Artificial Sequence: Synthetic peptide
  Seed: SIGKVCRTLLAKSVF
SIMKVNRRLLNKSVF

SEQ ID NO: 271421 - protein, 15 aa, Artificial Sequence
  Description of Artificial Sequence: Synthetic peptide
  Seed: SIGKVCRTLLAKSVF
SIMKVNRRLLPKSVF

SEQ ID NO: 271422 - protein, 15 aa, Artificial Sequence
  Description of Artificial Sequence: Synthetic peptide
  Seed: SIGKVCRTLLAKSVF
SIMKVNRRLLQKSVF

SEQ ID NO: 271423 - protein, 15 aa, Artificial Sequence
  Description of Artificial Sequence: Synthetic peptide
  Seed: SIGKVCRTLLAKSVF
SIMKVNRRLLRKSVF

SEQ ID NO: 271424 - protein, 15 aa, Artificial Sequence
  Description of Artificial Sequence: Synthetic peptide
  Seed: SIGKVCRTLLAKSVF
SIMKVNRRLLSKSVF

SEQ ID NO: 271425 - protein, 15 aa, Artificial Sequence
  Description of Artificial Sequence: Synthetic peptide
  Seed: SIGKVCRTLLAKSVF
SIMKVNRRLLTKSVF

SEQ ID NO: 271426 - protein, 15 aa, Artificial Sequence
  Description of Artificial Sequence: Synthetic peptide
  Seed: SIGKVCRTLLAKSVF
SIMKVNRRLLVKSVF

SEQ ID NO: 271427 - protein, 15 aa, Artificial Sequence
  Description of Artificial Sequence: Synthetic peptide
  Seed: SIGKVCRTLLAKSVF
SIMKVNRRLLYKSVF

SEQ ID NO: 271428 - protein, 15 aa, Artificial Sequence
  Description of Artificial Sequence: Synthetic peptide
  Seed: SIGKVCRTLLAKSVF
SIMKVNRSLLAKSVF

SEQ ID NO: 271429 - protein, 15 aa, Artificial Sequence
  Description of Artificial Sequence: Synthetic peptide
  Seed: SIGKVCRTLLAKSVF
SIMKVNRSLLKKSVF

SEQ ID NO: 271430 - protein, 15 aa, Artificial Sequence
  Description of Artificial Sequence: Synthetic peptide
  Seed: SIGKVCRTLLAKSVF
SIMKVNRSLLRKSVF

SEQ ID NO: 271431 - protein, 15 aa, Artificial Sequence
  Description of Artificial Sequence: Synthetic peptide
  Seed: SIGKVCRTLLAKSVF
SIMKVNRSLLSKSVF

SEQ ID NO: 271432 - protein, 15 aa, Artificial Sequence
  Description of Artificial Sequence: Synthetic peptide
  Seed: SIGKVCRTLLAKSVF
SIMKVNRTLLAKSVF

SEQ ID NO: 271433 - protein, 15 aa, Artificial Sequence
  Description of Artificial Sequence: Synthetic peptide
  Seed: SIGKVCRTLLAKSVF
SIMKVNRTLLKKSVF

SEQ ID NO: 271434 - protein, 15 aa, Artificial Sequence
  Description of Artificial Sequence: Synthetic peptide
  Seed: SIGKVCRTLLAKSVF
SIMKVNRTLLRKSVF

SEQ ID NO: 271435 - protein, 15 aa, Artificial Sequence
  Description of Artificial Sequence: Synthetic peptide
  Seed: SIGKVCRTLLAKSVF
SIMKVNRTLLSKSVF

SEQ ID NO: 271436 - protein, 15 aa, Artificial Sequence
  Description of Artificial Sequence: Synthetic peptide
  Seed: SIGKVCRTLLAKSVF
SIMKVNRVLLAKSVF

SEQ ID NO: 271437 - protein, 15 aa, Artificial Sequence
  Description of Artificial Sequence: Synthetic peptide
  Seed: SIGKVCRTLLAKSVF
SIMKVNRVLLRKSVF

SEQ ID NO: 271438 - protein, 15 aa, Artificial Sequence
  Description of Artificial Sequence: Synthetic peptide
  Seed: SIGKVCRTLLAKSVF
SIMKVNRVLLSKSVF

SEQ ID NO: 271439 - protein, 15 aa, Artificial Sequence
  Description of Artificial Sequence: Synthetic peptide
  Seed: SIGKVCRTLLAKSVF
SIMKVQRALLAKSVF

SEQ ID NO: 271440 - protein, 15 aa, Artificial Sequence
  Description of Artificial Sequence: Synthetic peptide
  Seed: SIGKVCRTLLAKSVF
SIMKVQRALLGKSVF

SEQ ID NO: 271441 - protein, 15 aa, Artificial Sequence
  Description of Artificial Sequence: Synthetic peptide
  Seed: SIGKVCRTLLAKSVF
SIMKVQRALLHKSVF

SEQ ID NO: 271442 - protein, 15 aa, Artificial Sequence
  Description of Artificial Sequence: Synthetic peptide
  Seed: SIGKVCRTLLAKSVF
SIMKVQRALLQKSVF

SEQ ID NO: 271443 - protein, 15 aa, Artificial Sequence
  Description of Artificial Sequence: Synthetic peptide
  Seed: SIGKVCRTLLAKSVF
SIMKVQRALLRKSVF

SEQ ID NO: 271444 - protein, 15 aa, Artificial Sequence
  Description of Artificial Sequence: Synthetic peptide
  Seed: SIGKVCRTLLAKSVF
SIMKVQRALLSKSVF

SEQ ID NO: 271445 - protein, 15 aa, Artificial Sequence
  Description of Artificial Sequence: Synthetic peptide
  Seed: SIGKVCRTLLAKSVF
SIMKVQRALLVKSVF

SEQ ID NO: 271446 - protein, 15 aa, Artificial Sequence
  Description of Artificial Sequence: Synthetic peptide
  Seed: SIGKVCRTLLAKSVF
SIMKVQRALLYKSVF

SEQ ID NO: 271447 - protein, 15 aa, Artificial Sequence
  Description of Artificial Sequence: Synthetic peptide
  Seed: SIGKVCRTLLAKSVF
SIMKVQRGLLAKSVF

SEQ ID NO: 271448 - protein, 15 aa, Artificial Sequence
  Description of Artificial Sequence: Synthetic peptide
  Seed: SIGKVCRTLLAKSVF
SIMKVQRGLLGKSVF

SEQ ID NO: 271449 - protein, 15 aa, Artificial Sequence
  Description of Artificial Sequence: Synthetic peptide
  Seed: SIGKVCRTLLAKSVF
SIMKVQRGLLQKSVF

SEQ ID NO: 271450 - protein, 15 aa, Artificial Sequence
  Description of Artificial Sequence: Synthetic peptide
  Seed: SIGKVCRTLLAKSVF
SIMKVQRGLLSKSVF

SEQ ID NO: 271451 - protein, 15 aa, Artificial Sequence
  Description of Artificial Sequence: Synthetic peptide
  Seed: SIGKVCRTLLAKSVF
SIMKVQRGLLYKSVF

SEQ ID NO: 271452 - protein, 15 aa, Artificial Sequence
  Description of Artificial Sequence: Synthetic peptide
  Seed: SIGKVCRTLLAKSVF
SIMKVQRHLLAKSVF

SEQ ID NO: 271453 - protein, 15 aa, Artificial Sequence
  Description of Artificial Sequence: Synthetic peptide
  Seed: SIGKVCRTLLAKSVF
SIMKVQRHLLGKSVF

SEQ ID NO: 271454 - protein, 15 aa, Artificial Sequence
  Description of Artificial Sequence: Synthetic peptide
  Seed: SIGKVCRTLLAKSVF
SIMKVQRHLLHKSVF

SEQ ID NO: 271455 - protein, 15 aa, Artificial Sequence
  Description of Artificial Sequence: Synthetic peptide
  Seed: SIGKVCRTLLAKSVF
SIMKVQRHLLIKSVF

SEQ ID NO: 271456 - protein, 15 aa, Artificial Sequence
  Description of Artificial Sequence: Synthetic peptide
  Seed: SIGKVCRTLLAKSVF
SIMKVQRHLLLKSVF

SEQ ID NO: 271457 - protein, 15 aa, Artificial Sequence
  Description of Artificial Sequence: Synthetic peptide
  Seed: SIGKVCRTLLAKSVF
SIMKVQRHLLMKSVF

SEQ ID NO: 271458 - protein, 15 aa, Artificial Sequence
  Description of Artificial Sequence: Synthetic peptide
  Seed: SIGKVCRTLLAKSVF
SIMKVQRHLLNKSVF

SEQ ID NO: 271459 - protein, 15 aa, Artificial Sequence
  Description of Artificial Sequence: Synthetic peptide
  Seed: SIGKVCRTLLAKSVF
SIMKVQRHLLQKSVF

SEQ ID NO: 271460 - protein, 15 aa, Artificial Sequence
  Description of Artificial Sequence: Synthetic peptide
  Seed: SIGKVCRTLLAKSVF
SIMKVQRHLLRKSVF

SEQ ID NO: 271461 - protein, 15 aa, Artificial Sequence
  Description of Artificial Sequence: Synthetic peptide
  Seed: SIGKVCRTLLAKSVF
SIMKVQRHLLSKSVF

SEQ ID NO: 271462 - protein, 15 aa, Artificial Sequence
  Description of Artificial Sequence: Synthetic peptide
  Seed: SIGKVCRTLLAKSVF
SIMKVQRHLLTKSVF

SEQ ID NO: 271463 - protein, 15 aa, Artificial Sequence
  Description of Artificial Sequence: Synthetic peptide
  Seed: SIGKVCRTLLAKSVF
SIMKVQRHLLVKSVF

SEQ ID NO: 271464 - protein, 15 aa, Artificial Sequence
  Description of Artificial Sequence: Synthetic peptide
  Seed: SIGKVCRTLLAKSVF
SIMKVQRHLLYKSVF

SEQ ID NO: 271465 - protein, 15 aa, Artificial Sequence
  Description of Artificial Sequence: Synthetic peptide
  Seed: SIGKVCRTLLAKSVF
SIMKVQRILLAKSVF

SEQ ID NO: 271466 - protein, 15 aa, Artificial Sequence
  Description of Artificial Sequence: Synthetic peptide
  Seed: SIGKVCRTLLAKSVF
SIMKVQRILLGKSVF

SEQ ID NO: 271467 - protein, 15 aa, Artificial Sequence
  Description of Artificial Sequence: Synthetic peptide
  Seed: SIGKVCRTLLAKSVF
SIMKVQRILLQKSVF

SEQ ID NO: 271468 - protein, 15 aa, Artificial Sequence
  Description of Artificial Sequence: Synthetic peptide
  Seed: SIGKVCRTLLAKSVF
SIMKVQRILLRKSVF

SEQ ID NO: 271469 - protein, 15 aa, Artificial Sequence
  Description of Artificial Sequence: Synthetic peptide
  Seed: SIGKVCRTLLAKSVF
SIMKVQRILLSKSVF

SEQ ID NO: 271470 - protein, 15 aa, Artificial Sequence
  Description of Artificial Sequence: Synthetic peptide
  Seed: SIGKVCRTLLAKSVF
SIMKVQRKLLAKSVF

SEQ ID NO: 271471 - protein, 15 aa, Artificial Sequence
  Description of Artificial Sequence: Synthetic peptide
  Seed: SIGKVCRTLLAKSVF
SIMKVQRKLLCKSVF

SEQ ID NO: 271472 - protein, 15 aa, Artificial Sequence
  Description of Artificial Sequence: Synthetic peptide
  Seed: SIGKVCRTLLAKSVF
SIMKVQRKLLDKSVF

SEQ ID NO: 271473 - protein, 15 aa, Artificial Sequence
  Description of Artificial Sequence: Synthetic peptide
  Seed: SIGKVCRTLLAKSVF
SIMKVQRKLLEKSVF

SEQ ID NO: 271474 - protein, 15 aa, Artificial Sequence
  Description of Artificial Sequence: Synthetic peptide
  Seed: SIGKVCRTLLAKSVF
SIMKVQRKLLFKSVF

SEQ ID NO: 271475 - protein, 15 aa, Artificial Sequence
  Description of Artificial Sequence: Synthetic peptide
  Seed: SIGKVCRTLLAKSVF
SIMKVQRKLLGKSVF

SEQ ID NO: 271476 - protein, 15 aa, Artificial Sequence
  Description of Artificial Sequence: Synthetic peptide
  Seed: SIGKVCRTLLAKSVF
SIMKVQRKLLHKSVF

SEQ ID NO: 271477 - protein, 15 aa, Artificial Sequence
  Description of Artificial Sequence: Synthetic peptide
  Seed: SIGKVCRTLLAKSVF
SIMKVQRKLLIKSVF

SEQ ID NO: 271478 - protein, 15 aa, Artificial Sequence
  Description of Artificial Sequence: Synthetic peptide
  Seed: SIGKVCRTLLAKSVF
SIMKVQRKLLKKSVF

SEQ ID NO: 271479 - protein, 15 aa, Artificial Sequence
  Description of Artificial Sequence: Synthetic peptide
  Seed: SIGKVCRTLLAKSVF
SIMKVQRKLLLKSVF

SEQ ID NO: 271480 - protein, 15 aa, Artificial Sequence
  Description of Artificial Sequence: Synthetic peptide
  Seed: SIGKVCRTLLAKSVF
SIMKVQRKLLMKSVF

SEQ ID NO: 271481 - protein, 15 aa, Artificial Sequence
  Description of Artificial Sequence: Synthetic peptide
  Seed: SIGKVCRTLLAKSVF
SIMKVQRKLLNKSVF

SEQ ID NO: 271482 - protein, 15 aa, Artificial Sequence
  Description of Artificial Sequence: Synthetic peptide
  Seed: SIGKVCRTLLAKSVF
SIMKVQRKLLPKSVF

SEQ ID NO: 271483 - protein, 15 aa, Artificial Sequence
  Description of Artificial Sequence: Synthetic peptide
  Seed: SIGKVCRTLLAKSVF
SIMKVQRKLLQKSVF

SEQ ID NO: 271484 - protein, 15 aa, Artificial Sequence
  Description of Artificial Sequence: Synthetic peptide
  Seed: SIGKVCRTLLAKSVF
SIMKVQRKLLRKSVF

SEQ ID NO: 271485 - protein, 15 aa, Artificial Sequence
  Description of Artificial Sequence: Synthetic peptide
  Seed: SIGKVCRTLLAKSVF
SIMKVQRKLLSKSVF

SEQ ID NO: 271486 - protein, 15 aa, Artificial Sequence
  Description of Artificial Sequence: Synthetic peptide
  Seed: SIGKVCRTLLAKSVF
SIMKVQRKLLTKSVF

SEQ ID NO: 271487 - protein, 15 aa, Artificial Sequence
  Description of Artificial Sequence: Synthetic peptide
  Seed: SIGKVCRTLLAKSVF
SIMKVQRKLLVKSVF

SEQ ID NO: 271488 - protein, 15 aa, Artificial Sequence
  Description of Artificial Sequence: Synthetic peptide
  Seed: SIGKVCRTLLAKSVF
SIMKVQRKLLWKSVF

SEQ ID NO: 271489 - protein, 15 aa, Artificial Sequence
  Description of Artificial Sequence: Synthetic peptide
  Seed: SIGKVCRTLLAKSVF
SIMKVQRKLLYKSVF

SEQ ID NO: 271490 - protein, 15 aa, Artificial Sequence
  Description of Artificial Sequence: Synthetic peptide
  Seed: SIGKVCRTLLAKSVF
SIMKVQRLLLGKSVF

SEQ ID NO: 271491 - protein, 15 aa, Artificial Sequence
  Description of Artificial Sequence: Synthetic peptide
  Seed: SIGKVCRTLLAKSVF
SIMKVQRMLLGKSVF

SEQ ID NO: 271492 - protein, 15 aa, Artificial Sequence
  Description of Artificial Sequence: Synthetic peptide
  Seed: SIGKVCRTLLAKSVF
SIMKVQRNLLAKSVF

SEQ ID NO: 271493 - protein, 15 aa, Artificial Sequence
  Description of Artificial Sequence: Synthetic peptide
  Seed: SIGKVCRTLLAKSVF
SIMKVQRNLLGKSVF

SEQ ID NO: 271494 - protein, 15 aa, Artificial Sequence
  Description of Artificial Sequence: Synthetic peptide
  Seed: SIGKVCRTLLAKSVF
SIMKVQRNLLHKSVF

SEQ ID NO: 271495 - protein, 15 aa, Artificial Sequence
  Description of Artificial Sequence: Synthetic peptide
  Seed: SIGKVCRTLLAKSVF
SIMKVQRNLLQKSVF

SEQ ID NO: 271496 - protein, 15 aa, Artificial Sequence
  Description of Artificial Sequence: Synthetic peptide
  Seed: SIGKVCRTLLAKSVF
SIMKVQRNLLRKSVF

SEQ ID NO: 271497 - protein, 15 aa, Artificial Sequence
  Description of Artificial Sequence: Synthetic peptide
  Seed: SIGKVCRTLLAKSVF
SIMKVQRNLLSKSVF

SEQ ID NO: 271498 - protein, 15 aa, Artificial Sequence
  Description of Artificial Sequence: Synthetic peptide
  Seed: SIGKVCRTLLAKSVF
SIMKVQRNLLTKSVF

SEQ ID NO: 271499 - protein, 15 aa, Artificial Sequence
  Description of Artificial Sequence: Synthetic peptide
  Seed: SIGKVCRTLLAKSVF
SIMKVQRNLLYKSVF

SEQ ID NO: 271500 - protein, 15 aa, Artificial Sequence
  Description of Artificial Sequence: Synthetic peptide
  Seed: SIGKVCRTLLAKSVF
SIMKVQRPLLAKSVF

SEQ ID NO: 271501 - protein, 15 aa, Artificial Sequence
  Description of Artificial Sequence: Synthetic peptide
  Seed: SIGKVCRTLLAKSVF
SIMKVQRPLLGKSVF

SEQ ID NO: 271502 - protein, 15 aa, Artificial Sequence
  Description of Artificial Sequence: Synthetic peptide
  Seed: SIGKVCRTLLAKSVF
SIMKVQRPLLQKSVF

SEQ ID NO: 271503 - protein, 15 aa, Artificial Sequence
  Description of Artificial Sequence: Synthetic peptide
  Seed: SIGKVCRTLLAKSVF
SIMKVQRPLLRKSVF

SEQ ID NO: 271504 - protein, 15 aa, Artificial Sequence
  Description of Artificial Sequence: Synthetic peptide
  Seed: SIGKVCRTLLAKSVF
SIMKVQRPLLSKSVF

SEQ ID NO: 271505 - protein, 15 aa, Artificial Sequence
  Description of Artificial Sequence: Synthetic peptide
  Seed: SIGKVCRTLLAKSVF
SIMKVQRQLLAKSVF

SEQ ID NO: 271506 - protein, 15 aa, Artificial Sequence
  Description of Artificial Sequence: Synthetic peptide
  Seed: SIGKVCRTLLAKSVF
SIMKVQRQLLQKSVF

SEQ ID NO: 271507 - protein, 15 aa, Artificial Sequence
  Description of Artificial Sequence: Synthetic peptide
  Seed: SIGKVCRTLLAKSVF
SIMKVQRQLLRKSVF

SEQ ID NO: 271508 - protein, 15 aa, Artificial Sequence
  Description of Artificial Sequence: Synthetic peptide
  Seed: SIGKVCRTLLAKSVF
SIMKVQRQLLSKSVF

SEQ ID NO: 271509 - protein, 15 aa, Artificial Sequence
  Description of Artificial Sequence: Synthetic peptide
  Seed: SIGKVCRTLLAKSVF
SIMKVQRRLLAKSVF

SEQ ID NO: 271510 - protein, 15 aa, Artificial Sequence
  Description of Artificial Sequence: Synthetic peptide
  Seed: SIGKVCRTLLAKSVF
SIMKVQRRLLCKSVF

SEQ ID NO: 271511 - protein, 15 aa, Artificial Sequence
  Description of Artificial Sequence: Synthetic peptide
  Seed: SIGKVCRTLLAKSVF
SIMKVQRRLLDKSVF

SEQ ID NO: 271512 - protein, 15 aa, Artificial Sequence
  Description of Artificial Sequence: Synthetic peptide
  Seed: SIGKVCRTLLAKSVF
SIMKVQRRLLEKSVF

SEQ ID NO: 271513 - protein, 15 aa, Artificial Sequence
  Description of Artificial Sequence: Synthetic peptide
  Seed: SIGKVCRTLLAKSVF
SIMKVQRRLLFKSVF

SEQ ID NO: 271514 - protein, 15 aa, Artificial Sequence
  Description of Artificial Sequence: Synthetic peptide
  Seed: SIGKVCRTLLAKSVF
SIMKVQRRLLGKSVF

SEQ ID NO: 271515 - protein, 15 aa, Artificial Sequence
  Description of Artificial Sequence: Synthetic peptide
  Seed: SIGKVCRTLLAKSVF
SIMKVQRRLLHKSVF

SEQ ID NO: 271516 - protein, 15 aa, Artificial Sequence
  Description of Artificial Sequence: Synthetic peptide
  Seed: SIGKVCRTLLAKSVF
SIMKVQRRLLIKSVF

SEQ ID NO: 271517 - protein, 15 aa, Artificial Sequence
  Description of Artificial Sequence: Synthetic peptide
  Seed: SIGKVCRTLLAKSVF
SIMKVQRRLLKKSVF

SEQ ID NO: 271518 - protein, 15 aa, Artificial Sequence
  Description of Artificial Sequence: Synthetic peptide
  Seed: SIGKVCRTLLAKSVF
SIMKVQRRLLLKSVF

SEQ ID NO: 271519 - protein, 15 aa, Artificial Sequence
  Description of Artificial Sequence: Synthetic peptide
  Seed: SIGKVCRTLLAKSVF
SIMKVQRRLLMKSVF

SEQ ID NO: 271520 - protein, 15 aa, Artificial Sequence
  Description of Artificial Sequence: Synthetic peptide
  Seed: SIGKVCRTLLAKSVF
SIMKVQRRLLNKSVF

SEQ ID NO: 271521 - protein, 15 aa, Artificial Sequence
  Description of Artificial Sequence: Synthetic peptide
  Seed: SIGKVCRTLLAKSVF
SIMKVQRRLLPKSVF

SEQ ID NO: 271522 - protein, 15 aa, Artificial Sequence
  Description of Artificial Sequence: Synthetic peptide
  Seed: SIGKVCRTLLAKSVF
SIMKVQRRLLQKSVF

SEQ ID NO: 271523 - protein, 15 aa, Artificial Sequence
  Description of Artificial Sequence: Synthetic peptide
  Seed: SIGKVCRTLLAKSVF
SIMKVQRRLLRKSVF

SEQ ID NO: 271524 - protein, 15 aa, Artificial Sequence
  Description of Artificial Sequence: Synthetic peptide
  Seed: SIGKVCRTLLAKSVF
SIMKVQRRLLSKSVF

SEQ ID NO: 271525 - protein, 15 aa, Artificial Sequence
  Description of Artificial Sequence: Synthetic peptide
  Seed: SIGKVCRTLLAKSVF
SIMKVQRRLLTKSVF

SEQ ID NO: 271526 - protein, 15 aa, Artificial Sequence
  Description of Artificial Sequence: Synthetic peptide
  Seed: SIGKVCRTLLAKSVF
SIMKVQRRLLVKSVF

SEQ ID NO: 271527 - protein, 15 aa, Artificial Sequence
  Description of Artificial Sequence: Synthetic peptide
  Seed: SIGKVCRTLLAKSVF
SIMKVQRRLLWKSVF

SEQ ID NO: 271528 - protein, 15 aa, Artificial Sequence
  Description of Artificial Sequence: Synthetic peptide
  Seed: SIGKVCRTLLAKSVF
SIMKVQRRLLYKSVF

SEQ ID NO: 271529 - protein, 15 aa, Artificial Sequence
  Description of Artificial Sequence: Synthetic peptide
  Seed: SIGKVCRTLLAKSVF
SIMKVQRSLLAKSVF

SEQ ID NO: 271530 - protein, 15 aa, Artificial Sequence
  Description of Artificial Sequence: Synthetic peptide
  Seed: SIGKVCRTLLAKSVF
SIMKVQRSLLGKSVF

SEQ ID NO: 271531 - protein, 15 aa, Artificial Sequence
  Description of Artificial Sequence: Synthetic peptide
  Seed: SIGKVCRTLLAKSVF
SIMKVQRSLLHKSVF

SEQ ID NO: 271532 - protein, 15 aa, Artificial Sequence
  Description of Artificial Sequence: Synthetic peptide
  Seed: SIGKVCRTLLAKSVF
SIMKVQRSLLKKSVF

SEQ ID NO: 271533 - protein, 15 aa, Artificial Sequence
  Description of Artificial Sequence: Synthetic peptide
  Seed: SIGKVCRTLLAKSVF
SIMKVQRSLLQKSVF

SEQ ID NO: 271534 - protein, 15 aa, Artificial Sequence
  Description of Artificial Sequence: Synthetic peptide
  Seed: SIGKVCRTLLAKSVF
SIMKVQRSLLRKSVF

SEQ ID NO: 271535 - protein, 15 aa, Artificial Sequence
  Description of Artificial Sequence: Synthetic peptide
  Seed: SIGKVCRTLLAKSVF
SIMKVQRSLLSKSVF

SEQ ID NO: 271536 - protein, 15 aa, Artificial Sequence
  Description of Artificial Sequence: Synthetic peptide
  Seed: SIGKVCRTLLAKSVF
SIMKVQRSLLTKSVF

SEQ ID NO: 271537 - protein, 15 aa, Artificial Sequence
  Description of Artificial Sequence: Synthetic peptide
  Seed: SIGKVCRTLLAKSVF
SIMKVQRSLLVKSVF

SEQ ID NO: 271538 - protein, 15 aa, Artificial Sequence
  Description of Artificial Sequence: Synthetic peptide
  Seed: SIGKVCRTLLAKSVF
SIMKVQRSLLYKSVF

SEQ ID NO: 271539 - protein, 15 aa, Artificial Sequence
  Description of Artificial Sequence: Synthetic peptide
  Seed: SIGKVCRTLLAKSVF
SIMKVQRTLLAKSVF

SEQ ID NO: 271540 - protein, 15 aa, Artificial Sequence
  Description of Artificial Sequence: Synthetic peptide
  Seed: SIGKVCRTLLAKSVF
SIMKVQRTLLGKSVF

SEQ ID NO: 271541 - protein, 15 aa, Artificial Sequence
  Description of Artificial Sequence: Synthetic peptide
  Seed: SIGKVCRTLLAKSVF
SIMKVQRTLLHKSVF

SEQ ID NO: 271542 - protein, 15 aa, Artificial Sequence
  Description of Artificial Sequence: Synthetic peptide
  Seed: SIGKVCRTLLAKSVF
SIMKVQRTLLKKSVF

SEQ ID NO: 271543 - protein, 15 aa, Artificial Sequence
  Description of Artificial Sequence: Synthetic peptide
  Seed: SIGKVCRTLLAKSVF
SIMKVQRTLLQKSVF

SEQ ID NO: 271544 - protein, 15 aa, Artificial Sequence
  Description of Artificial Sequence: Synthetic peptide
  Seed: SIGKVCRTLLAKSVF
SIMKVQRTLLRKSVF

SEQ ID NO: 271545 - protein, 15 aa, Artificial Sequence
  Description of Artificial Sequence: Synthetic peptide
  Seed: SIGKVCRTLLAKSVF
SIMKVQRTLLSKSVF

SEQ ID NO: 271546 - protein, 15 aa, Artificial Sequence
  Description of Artificial Sequence: Synthetic peptide
  Seed: SIGKVCRTLLAKSVF
SIMKVQRTLLTKSVF

SEQ ID NO: 271547 - protein, 15 aa, Artificial Sequence
  Description of Artificial Sequence: Synthetic peptide
  Seed: SIGKVCRTLLAKSVF
SIMKVQRVLLAKSVF

SEQ ID NO: 271548 - protein, 15 aa, Artificial Sequence
  Description of Artificial Sequence: Synthetic peptide
  Seed: SIGKVCRTLLAKSVF
SIMKVQRVLLGKSVF

SEQ ID NO: 271549 - protein, 15 aa, Artificial Sequence
  Description of Artificial Sequence: Synthetic peptide
  Seed: SIGKVCRTLLAKSVF
SIMKVQRVLLHKSVF

SEQ ID NO: 271550 - protein, 15 aa, Artificial Sequence
  Description of Artificial Sequence: Synthetic peptide
  Seed: SIGKVCRTLLAKSVF
SIMKVQRVLLKKSVF

SEQ ID NO: 271551 - protein, 15 aa, Artificial Sequence
  Description of Artificial Sequence: Synthetic peptide
  Seed: SIGKVCRTLLAKSVF
SIMKVQRVLLQKSVF

SEQ ID NO: 271552 - protein, 15 aa, Artificial Sequence
  Description of Artificial Sequence: Synthetic peptide
  Seed: SIGKVCRTLLAKSVF
SIMKVQRVLLRKSVF

SEQ ID NO: 271553 - protein, 15 aa, Artificial Sequence
  Description of Artificial Sequence: Synthetic peptide
  Seed: SIGKVCRTLLAKSVF
SIMKVQRVLLSKSVF

SEQ ID NO: 271554 - protein, 15 aa, Artificial Sequence
  Description of Artificial Sequence: Synthetic peptide
  Seed: SIGKVCRTLLAKSVF
SIMKVRRALLAKSVF

SEQ ID NO: 271555 - protein, 15 aa, Artificial Sequence
  Description of Artificial Sequence: Synthetic peptide
  Seed: SIGKVCRTLLAKSVF
SIMKVRRALLDKSVF

SEQ ID NO: 271556 - protein, 15 aa, Artificial Sequence
  Description of Artificial Sequence: Synthetic peptide
  Seed: SIGKVCRTLLAKSVF
SIMKVRRALLEKSVF

SEQ ID NO: 271557 - protein, 15 aa, Artificial Sequence
  Description of Artificial Sequence: Synthetic peptide
  Seed: SIGKVCRTLLAKSVF
SIMKVRRALLGKSVF

SEQ ID NO: 271558 - protein, 15 aa, Artificial Sequence
  Description of Artificial Sequence: Synthetic peptide
  Seed: SIGKVCRTLLAKSVF
SIMKVRRALLHKSVF

SEQ ID NO: 271559 - protein, 15 aa, Artificial Sequence
  Description of Artificial Sequence: Synthetic peptide
  Seed: SIGKVCRTLLAKSVF
SIMKVRRALLKKSVF

SEQ ID NO: 271560 - protein, 15 aa, Artificial Sequence
  Description of Artificial Sequence: Synthetic peptide
  Seed: SIGKVCRTLLAKSVF
SIMKVRRALLMKSVF

SEQ ID NO: 271561 - protein, 15 aa, Artificial Sequence
  Description of Artificial Sequence: Synthetic peptide
  Seed: SIGKVCRTLLAKSVF
SIMKVRRALLNKSVF

SEQ ID NO: 271562 - protein, 15 aa, Artificial Sequence
  Description of Artificial Sequence: Synthetic peptide
  Seed: SIGKVCRTLLAKSVF
SIMKVRRALLQKSVF

SEQ ID NO: 271563 - protein, 15 aa, Artificial Sequence
  Description of Artificial Sequence: Synthetic peptide
  Seed: SIGKVCRTLLAKSVF
SIMKVRRALLRKSVF

SEQ ID NO: 271564 - protein, 15 aa, Artificial Sequence
  Description of Artificial Sequence: Synthetic peptide
  Seed: SIGKVCRTLLAKSVF
SIMKVRRALLSKSVF

SEQ ID NO: 271565 - protein, 15 aa, Artificial Sequence
  Description of Artificial Sequence: Synthetic peptide
  Seed: SIGKVCRTLLAKSVF
SIMKVRRALLTKSVF

SEQ ID NO: 271566 - protein, 15 aa, Artificial Sequence
  Description of Artificial Sequence: Synthetic peptide
  Seed: SIGKVCRTLLAKSVF
SIMKVRRALLVKSVF

SEQ ID NO: 271567 - protein, 15 aa, Artificial Sequence
  Description of Artificial Sequence: Synthetic peptide
  Seed: SIGKVCRTLLAKSVF
SIMKVRRALLYKSVF

SEQ ID NO: 271568 - protein, 15 aa, Artificial Sequence
  Description of Artificial Sequence: Synthetic peptide
  Seed: SIGKVCRTLLAKSVF
SIMKVRRGLLQKSVF

SEQ ID NO: 271569 - protein, 15 aa, Artificial Sequence
  Description of Artificial Sequence: Synthetic peptide
  Seed: SIGKVCRTLLAKSVF
SIMKVRRHLLAKSVF

SEQ ID NO: 271570 - protein, 15 aa, Artificial Sequence
  Description of Artificial Sequence: Synthetic peptide
  Seed: SIGKVCRTLLAKSVF
SIMKVRRHLLGKSVF

SEQ ID NO: 271571 - protein, 15 aa, Artificial Sequence
  Description of Artificial Sequence: Synthetic peptide
  Seed: SIGKVCRTLLAKSVF
SIMKVRRHLLQKSVF

SEQ ID NO: 271572 - protein, 15 aa, Artificial Sequence
  Description of Artificial Sequence: Synthetic peptide
  Seed: SIGKVCRTLLAKSVF
SIMKVRRHLLSKSVF

SEQ ID NO: 271573 - protein, 15 aa, Artificial Sequence
  Description of Artificial Sequence: Synthetic peptide
  Seed: SIGKVCRTLLAKSVF
SIMKVRRILLAKSVF

SEQ ID NO: 271574 - protein, 15 aa, Artificial Sequence
  Description of Artificial Sequence: Synthetic peptide
  Seed: SIGKVCRTLLAKSVF
SIMKVRRILLHKSVF

SEQ ID NO: 271575 - protein, 15 aa, Artificial Sequence
  Description of Artificial Sequence: Synthetic peptide
  Seed: SIGKVCRTLLAKSVF
SIMKVRRILLSKSVF

SEQ ID NO: 271576 - protein, 15 aa, Artificial Sequence
  Description of Artificial Sequence: Synthetic peptide
  Seed: SIGKVCRTLLAKSVF
SIMKVRRKLLAKSVF

SEQ ID NO: 271577 - protein, 15 aa, Artificial Sequence
  Description of Artificial Sequence: Synthetic peptide
  Seed: SIGKVCRTLLAKSVF
SIMKVRRKLLCKSVF

SEQ ID NO: 271578 - protein, 15 aa, Artificial Sequence
  Description of Artificial Sequence: Synthetic peptide
  Seed: SIGKVCRTLLAKSVF
SIMKVRRKLLDKSVF

SEQ ID NO: 271579 - protein, 15 aa, Artificial Sequence
  Description of Artificial Sequence: Synthetic peptide
  Seed: SIGKVCRTLLAKSVF
SIMKVRRKLLEKSVF

SEQ ID NO: 271580 - protein, 15 aa, Artificial Sequence
  Description of Artificial Sequence: Synthetic peptide
  Seed: SIGKVCRTLLAKSVF
SIMKVRRKLLGKSVF

SEQ ID NO: 271581 - protein, 15 aa, Artificial Sequence
  Description of Artificial Sequence: Synthetic peptide
  Seed: SIGKVCRTLLAKSVF
SIMKVRRKLLHKSVF

SEQ ID NO: 271582 - protein, 15 aa, Artificial Sequence
  Description of Artificial Sequence: Synthetic peptide
  Seed: SIGKVCRTLLAKSVF
SIMKVRRKLLIKSVF

SEQ ID NO: 271583 - protein, 15 aa, Artificial Sequence
  Description of Artificial Sequence: Synthetic peptide
  Seed: SIGKVCRTLLAKSVF
SIMKVRRKLLLKSVF

SEQ ID NO: 271584 - protein, 15 aa, Artificial Sequence
  Description of Artificial Sequence: Synthetic peptide
  Seed: SIGKVCRTLLAKSVF
SIMKVRRKLLMKSVF

SEQ ID NO: 271585 - protein, 15 aa, Artificial Sequence
  Description of Artificial Sequence: Synthetic peptide
  Seed: SIGKVCRTLLAKSVF
SIMKVRRKLLNKSVF

SEQ ID NO: 271586 - protein, 15 aa, Artificial Sequence
  Description of Artificial Sequence: Synthetic peptide
  Seed: SIGKVCRTLLAKSVF
SIMKVRRKLLQKSVF

SEQ ID NO: 271587 - protein, 15 aa, Artificial Sequence
  Description of Artificial Sequence: Synthetic peptide
  Seed: SIGKVCRTLLAKSVF
SIMKVRRKLLSKSVF

SEQ ID NO: 271588 - protein, 15 aa, Artificial Sequence
  Description of Artificial Sequence: Synthetic peptide
  Seed: SIGKVCRTLLAKSVF
SIMKVRRKLLTKSVF

SEQ ID NO: 271589 - protein, 15 aa, Artificial Sequence
  Description of Artificial Sequence: Synthetic peptide
  Seed: SIGKVCRTLLAKSVF
SIMKVRRKLLVKSVF

SEQ ID NO: 271590 - protein, 15 aa, Artificial Sequence
  Description of Artificial Sequence: Synthetic peptide
  Seed: SIGKVCRTLLAKSVF
SIMKVRRKLLYKSVF

SEQ ID NO: 271591 - protein, 15 aa, Artificial Sequence
  Description of Artificial Sequence: Synthetic peptide
  Seed: SIGKVCRTLLAKSVF
SIMKVRRLLLSKSVF

SEQ ID NO: 271592 - protein, 15 aa, Artificial Sequence
  Description of Artificial Sequence: Synthetic peptide
  Seed: SIGKVCRTLLAKSVF
SIMKVRRNLLAKSVF

SEQ ID NO: 271593 - protein, 15 aa, Artificial Sequence
  Description of Artificial Sequence: Synthetic peptide
  Seed: SIGKVCRTLLAKSVF
SIMKVRRNLLGKSVF

SEQ ID NO: 271594 - protein, 15 aa, Artificial Sequence
  Description of Artificial Sequence: Synthetic peptide
  Seed: SIGKVCRTLLAKSVF
SIMKVRRNLLQKSVF

SEQ ID NO: 271595 - protein, 15 aa, Artificial Sequence
  Description of Artificial Sequence: Synthetic peptide
  Seed: SIGKVCRTLLAKSVF
SIMKVRRNLLSKSVF

SEQ ID NO: 271596 - protein, 15 aa, Artificial Sequence
  Description of Artificial Sequence: Synthetic peptide
  Seed: SIGKVCRTLLAKSVF
SIMKVRRPLLGKSVF

SEQ ID NO: 271597 - protein, 15 aa, Artificial Sequence
  Description of Artificial Sequence: Synthetic peptide
  Seed: SIGKVCRTLLAKSVF
SIMKVRRPLLQKSVF

SEQ ID NO: 271598 - protein, 15 aa, Artificial Sequence
  Description of Artificial Sequence: Synthetic peptide
  Seed: SIGKVCRTLLAKSVF
SIMKVRRQLLAKSVF

SEQ ID NO: 271599 - protein, 15 aa, Artificial Sequence
  Description of Artificial Sequence: Synthetic peptide
  Seed: SIGKVCRTLLAKSVF
SIMKVRRQLLGKSVF

SEQ ID NO: 271600 - protein, 15 aa, Artificial Sequence
  Description of Artificial Sequence: Synthetic peptide
  Seed: SIGKVCRTLLAKSVF
SIMKVRRQLLQKSVF

SEQ ID NO: 271601 - protein, 15 aa, Artificial Sequence
  Description of Artificial Sequence: Synthetic peptide
  Seed: SIGKVCRTLLAKSVF
SIMKVRRQLLSKSVF

SEQ ID NO: 271602 - protein, 15 aa, Artificial Sequence
  Description of Artificial Sequence: Synthetic peptide
  Seed: SIGKVCRTLLAKSVF
SIMKVRRRLLAKSVF

SEQ ID NO: 271603 - protein, 15 aa, Artificial Sequence
  Description of Artificial Sequence: Synthetic peptide
  Seed: SIGKVCRTLLAKSVF
SIMKVRRRLLCKSVF

SEQ ID NO: 271604 - protein, 15 aa, Artificial Sequence
  Description of Artificial Sequence: Synthetic peptide
  Seed: SIGKVCRTLLAKSVF
SIMKVRRRLLDKSVF

SEQ ID NO: 271605 - protein, 15 aa, Artificial Sequence
  Description of Artificial Sequence: Synthetic peptide
  Seed: SIGKVCRTLLAKSVF
SIMKVRRRLLEKSVF

SEQ ID NO: 271606 - protein, 15 aa, Artificial Sequence
  Description of Artificial Sequence: Synthetic peptide
  Seed: SIGKVCRTLLAKSVF
SIMKVRRRLLGKSVF

SEQ ID NO: 271607 - protein, 15 aa, Artificial Sequence
  Description of Artificial Sequence: Synthetic peptide
  Seed: SIGKVCRTLLAKSVF
SIMKVRRRLLHKSVF

SEQ ID NO: 271608 - protein, 15 aa, Artificial Sequence
  Description of Artificial Sequence: Synthetic peptide
  Seed: SIGKVCRTLLAKSVF
SIMKVRRRLLIKSVF

SEQ ID NO: 271609 - protein, 15 aa, Artificial Sequence
  Description of Artificial Sequence: Synthetic peptide
  Seed: SIGKVCRTLLAKSVF
SIMKVRRRLLLKSVF

SEQ ID NO: 271610 - protein, 15 aa, Artificial Sequence
  Description of Artificial Sequence: Synthetic peptide
  Seed: SIGKVCRTLLAKSVF
SIMKVRRRLLMKSVF

SEQ ID NO: 271611 - protein, 15 aa, Artificial Sequence
  Description of Artificial Sequence: Synthetic peptide
  Seed: SIGKVCRTLLAKSVF
SIMKVRRRLLNKSVF

SEQ ID NO: 271612 - protein, 15 aa, Artificial Sequence
  Description of Artificial Sequence: Synthetic peptide
  Seed: SIGKVCRTLLAKSVF
SIMKVRRRLLQKSVF

SEQ ID NO: 271613 - protein, 15 aa, Artificial Sequence
  Description of Artificial Sequence: Synthetic peptide
  Seed: SIGKVCRTLLAKSVF
SIMKVRRRLLSKSVF

SEQ ID NO: 271614 - protein, 15 aa, Artificial Sequence
  Description of Artificial Sequence: Synthetic peptide
  Seed: SIGKVCRTLLAKSVF
SIMKVRRRLLTKSVF

SEQ ID NO: 271615 - protein, 15 aa, Artificial Sequence
  Description of Artificial Sequence: Synthetic peptide
  Seed: SIGKVCRTLLAKSVF
SIMKVRRRLLVKSVF

SEQ ID NO: 271616 - protein, 15 aa, Artificial Sequence
  Description of Artificial Sequence: Synthetic peptide
  Seed: SIGKVCRTLLAKSVF
SIMKVRRRLLYKSVF

SEQ ID NO: 271617 - protein, 15 aa, Artificial Sequence
  Description of Artificial Sequence: Synthetic peptide
  Seed: SIGKVCRTLLAKSVF
SIMKVRRSLLAKSVF

SEQ ID NO: 271618 - protein, 15 aa, Artificial Sequence
  Description of Artificial Sequence: Synthetic peptide
  Seed: SIGKVCRTLLAKSVF
SIMKVRRSLLCKSVF

SEQ ID NO: 271619 - protein, 15 aa, Artificial Sequence
  Description of Artificial Sequence: Synthetic peptide
  Seed: SIGKVCRTLLAKSVF
SIMKVRRSLLEKSVF

SEQ ID NO: 271620 - protein, 15 aa, Artificial Sequence
  Description of Artificial Sequence: Synthetic peptide
  Seed: SIGKVCRTLLAKSVF
SIMKVRRSLLGKSVF

SEQ ID NO: 271621 - protein, 15 aa, Artificial Sequence
  Description of Artificial Sequence: Synthetic peptide
  Seed: SIGKVCRTLLAKSVF
SIMKVRRSLLHKSVF

SEQ ID NO: 271622 - protein, 15 aa, Artificial Sequence
  Description of Artificial Sequence: Synthetic peptide
  Seed: SIGKVCRTLLAKSVF
SIMKVRRSLLMKSVF

SEQ ID NO: 271623 - protein, 15 aa, Artificial Sequence
  Description of Artificial Sequence: Synthetic peptide
  Seed: SIGKVCRTLLAKSVF
SIMKVRRSLLQKSVF

SEQ ID NO: 271624 - protein, 15 aa, Artificial Sequence
  Description of Artificial Sequence: Synthetic peptide
  Seed: SIGKVCRTLLAKSVF
SIMKVRRSLLRKSVF

SEQ ID NO: 271625 - protein, 15 aa, Artificial Sequence
  Description of Artificial Sequence: Synthetic peptide
  Seed: SIGKVCRTLLAKSVF
SIMKVRRSLLSKSVF

SEQ ID NO: 271626 - protein, 15 aa, Artificial Sequence
  Description of Artificial Sequence: Synthetic peptide
  Seed: SIGKVCRTLLAKSVF
SIMKVRRSLLVKSVF

SEQ ID NO: 271627 - protein, 15 aa, Artificial Sequence
  Description of Artificial Sequence: Synthetic peptide
  Seed: SIGKVCRTLLAKSVF
SIMKVRRSLLYKSVF

SEQ ID NO: 271628 - protein, 15 aa, Artificial Sequence
  Description of Artificial Sequence: Synthetic peptide
  Seed: SIGKVCRTLLAKSVF
SIMKVRRTLLAKSVF

SEQ ID NO: 271629 - protein, 15 aa, Artificial Sequence
  Description of Artificial Sequence: Synthetic peptide
  Seed: SIGKVCRTLLAKSVF
SIMKVRRTLLEKSVF

SEQ ID NO: 271630 - protein, 15 aa, Artificial Sequence
  Description of Artificial Sequence: Synthetic peptide
  Seed: SIGKVCRTLLAKSVF
SIMKVRRTLLGKSVF

SEQ ID NO: 271631 - protein, 15 aa, Artificial Sequence
  Description of Artificial Sequence: Synthetic peptide
  Seed: SIGKVCRTLLAKSVF
SIMKVRRTLLHKSVF

SEQ ID NO: 271632 - protein, 15 aa, Artificial Sequence
  Description of Artificial Sequence: Synthetic peptide
  Seed: SIGKVCRTLLAKSVF
SIMKVRRTLLIKSVF

SEQ ID NO: 271633 - protein, 15 aa, Artificial Sequence
  Description of Artificial Sequence: Synthetic peptide
  Seed: SIGKVCRTLLAKSVF
SIMKVRRTLLKKSVF

SEQ ID NO: 271634 - protein, 15 aa, Artificial Sequence
  Description of Artificial Sequence: Synthetic peptide
  Seed: SIGKVCRTLLAKSVF
SIMKVRRTLLLKSVF

SEQ ID NO: 271635 - protein, 15 aa, Artificial Sequence
  Description of Artificial Sequence: Synthetic peptide
  Seed: SIGKVCRTLLAKSVF
SIMKVRRTLLMKSVF

SEQ ID NO: 271636 - protein, 15 aa, Artificial Sequence
  Description of Artificial Sequence: Synthetic peptide
  Seed: SIGKVCRTLLAKSVF
SIMKVRRTLLNKSVF

SEQ ID NO: 271637 - protein, 15 aa, Artificial Sequence
  Description of Artificial Sequence: Synthetic peptide
  Seed: SIGKVCRTLLAKSVF
SIMKVRRTLLQKSVF

SEQ ID NO: 271638 - protein, 15 aa, Artificial Sequence
  Description of Artificial Sequence: Synthetic peptide
  Seed: SIGKVCRTLLAKSVF
SIMKVRRTLLRKSVF

SEQ ID NO: 271639 - protein, 15 aa, Artificial Sequence
  Description of Artificial Sequence: Synthetic peptide
  Seed: SIGKVCRTLLAKSVF
SIMKVRRTLLSKSVF

SEQ ID NO: 271640 - protein, 15 aa, Artificial Sequence
  Description of Artificial Sequence: Synthetic peptide
  Seed: SIGKVCRTLLAKSVF
SIMKVRRTLLTKSVF

SEQ ID NO: 271641 - protein, 15 aa, Artificial Sequence
  Description of Artificial Sequence: Synthetic peptide
  Seed: SIGKVCRTLLAKSVF
SIMKVRRTLLVKSVF

SEQ ID NO: 271642 - protein, 15 aa, Artificial Sequence
  Description of Artificial Sequence: Synthetic peptide
  Seed: SIGKVCRTLLAKSVF
SIMKVRRTLLYKSVF

SEQ ID NO: 271643 - protein, 15 aa, Artificial Sequence
  Description of Artificial Sequence: Synthetic peptide
  Seed: SIGKVCRTLLAKSVF
SIMKVRRVLLAKSVF

SEQ ID NO: 271644 - protein, 15 aa, Artificial Sequence
  Description of Artificial Sequence: Synthetic peptide
  Seed: SIGKVCRTLLAKSVF
SIMKVRRVLLDKSVF

SEQ ID NO: 271645 - protein, 15 aa, Artificial Sequence
  Description of Artificial Sequence: Synthetic peptide
  Seed: SIGKVCRTLLAKSVF
SIMKVRRVLLGKSVF

SEQ ID NO: 271646 - protein, 15 aa, Artificial Sequence
  Description of Artificial Sequence: Synthetic peptide
  Seed: SIGKVCRTLLAKSVF
SIMKVRRVLLHKSVF

SEQ ID NO: 271647 - protein, 15 aa, Artificial Sequence
  Description of Artificial Sequence: Synthetic peptide
  Seed: SIGKVCRTLLAKSVF
SIMKVRRVLLKKSVF

SEQ ID NO: 271648 - protein, 15 aa, Artificial Sequence
  Description of Artificial Sequence: Synthetic peptide
  Seed: SIGKVCRTLLAKSVF
SIMKVRRVLLQKSVF

SEQ ID NO: 271649 - protein, 15 aa, Artificial Sequence
  Description of Artificial Sequence: Synthetic peptide
  Seed: SIGKVCRTLLAKSVF
SIMKVRRVLLRKSVF

SEQ ID NO: 271650 - protein, 15 aa, Artificial Sequence
  Description of Artificial Sequence: Synthetic peptide
  Seed: SIGKVCRTLLAKSVF
SIMKVRRVLLSKSVF

SEQ ID NO: 271651 - protein, 15 aa, Artificial Sequence
  Description of Artificial Sequence: Synthetic peptide
  Seed: SIGKVCRTLLAKSVF
SIMKVRRVLLYKSVF

SEQ ID NO: 271652 - protein, 15 aa, Artificial Sequence
  Description of Artificial Sequence: Synthetic peptide
  Seed: SIGKVCRTLLAKSVF
SIMKVSRALLAKSVF

SEQ ID NO: 271653 - protein, 15 aa, Artificial Sequence
  Description of Artificial Sequence: Synthetic peptide
  Seed: SIGKVCRTLLAKSVF
SIMKVSRALLGKSVF

SEQ ID NO: 271654 - protein, 15 aa, Artificial Sequence
  Description of Artificial Sequence: Synthetic peptide
  Seed: SIGKVCRTLLAKSVF
SIMKVSRALLQKSVF

SEQ ID NO: 271655 - protein, 15 aa, Artificial Sequence
  Description of Artificial Sequence: Synthetic peptide
  Seed: SIGKVCRTLLAKSVF
SIMKVSRALLSKSVF

SEQ ID NO: 271656 - protein, 15 aa, Artificial Sequence
  Description of Artificial Sequence: Synthetic peptide
  Seed: SIGKVCRTLLAKSVF
SIMKVSRHLLAKSVF

SEQ ID NO: 271657 - protein, 15 aa, Artificial Sequence
  Description of Artificial Sequence: Synthetic peptide
  Seed: SIGKVCRTLLAKSVF
SIMKVSRHLLGKSVF

SEQ ID NO: 271658 - protein, 15 aa, Artificial Sequence
  Description of Artificial Sequence: Synthetic peptide
  Seed: SIGKVCRTLLAKSVF
SIMKVSRHLLQKSVF

SEQ ID NO: 271659 - protein, 15 aa, Artificial Sequence
  Description of Artificial Sequence: Synthetic peptide
  Seed: SIGKVCRTLLAKSVF
SIMKVSRHLLSKSVF

SEQ ID NO: 271660 - protein, 15 aa, Artificial Sequence
  Description of Artificial Sequence: Synthetic peptide
  Seed: SIGKVCRTLLAKSVF
SIMKVSRHLLYKSVF

SEQ ID NO: 271661 - protein, 15 aa, Artificial Sequence
  Description of Artificial Sequence: Synthetic peptide
  Seed: SIGKVCRTLLAKSVF
SIMKVSRKLLAKSVF

SEQ ID NO: 271662 - protein, 15 aa, Artificial Sequence
  Description of Artificial Sequence: Synthetic peptide
  Seed: SIGKVCRTLLAKSVF
SIMKVSRKLLCKSVF

SEQ ID NO: 271663 - protein, 15 aa, Artificial Sequence
  Description of Artificial Sequence: Synthetic peptide
  Seed: SIGKVCRTLLAKSVF
SIMKVSRKLLDKSVF

SEQ ID NO: 271664 - protein, 15 aa, Artificial Sequence
  Description of Artificial Sequence: Synthetic peptide
  Seed: SIGKVCRTLLAKSVF
SIMKVSRKLLEKSVF

SEQ ID NO: 271665 - protein, 15 aa, Artificial Sequence
  Description of Artificial Sequence: Synthetic peptide
  Seed: SIGKVCRTLLAKSVF
SIMKVSRKLLFKSVF

SEQ ID NO: 271666 - protein, 15 aa, Artificial Sequence
  Description of Artificial Sequence: Synthetic peptide
  Seed: SIGKVCRTLLAKSVF
SIMKVSRKLLGKSVF

SEQ ID NO: 271667 - protein, 15 aa, Artificial Sequence
  Description of Artificial Sequence: Synthetic peptide
  Seed: SIGKVCRTLLAKSVF
SIMKVSRKLLHKSVF

SEQ ID NO: 271668 - protein, 15 aa, Artificial Sequence
  Description of Artificial Sequence: Synthetic peptide
  Seed: SIGKVCRTLLAKSVF
SIMKVSRKLLIKSVF

SEQ ID NO: 271669 - protein, 15 aa, Artificial Sequence
  Description of Artificial Sequence: Synthetic peptide
  Seed: SIGKVCRTLLAKSVF
SIMKVSRKLLKKSVF

SEQ ID NO: 271670 - protein, 15 aa, Artificial Sequence
  Description of Artificial Sequence: Synthetic peptide
  Seed: SIGKVCRTLLAKSVF
SIMKVSRKLLLKSVF

SEQ ID NO: 271671 - protein, 15 aa, Artificial Sequence
  Description of Artificial Sequence: Synthetic peptide
  Seed: SIGKVCRTLLAKSVF
SIMKVSRKLLMKSVF

SEQ ID NO: 271672 - protein, 15 aa, Artificial Sequence
  Description of Artificial Sequence: Synthetic peptide
  Seed: SIGKVCRTLLAKSVF
SIMKVSRKLLNKSVF

SEQ ID NO: 271673 - protein, 15 aa, Artificial Sequence
  Description of Artificial Sequence: Synthetic peptide
  Seed: SIGKVCRTLLAKSVF
SIMKVSRKLLPKSVF

SEQ ID NO: 271674 - protein, 15 aa, Artificial Sequence
  Description of Artificial Sequence: Synthetic peptide
  Seed: SIGKVCRTLLAKSVF
SIMKVSRKLLQKSVF

SEQ ID NO: 271675 - protein, 15 aa, Artificial Sequence
  Description of Artificial Sequence: Synthetic peptide
  Seed: SIGKVCRTLLAKSVF
SIMKVSRKLLRKSVF

SEQ ID NO: 271676 - protein, 15 aa, Artificial Sequence
  Description of Artificial Sequence: Synthetic peptide
  Seed: SIGKVCRTLLAKSVF
SIMKVSRKLLSKSVF

SEQ ID NO: 271677 - protein, 15 aa, Artificial Sequence
  Description of Artificial Sequence: Synthetic peptide
  Seed: SIGKVCRTLLAKSVF
SIMKVSRKLLTKSVF

SEQ ID NO: 271678 - protein, 15 aa, Artificial Sequence
  Description of Artificial Sequence: Synthetic peptide
  Seed: SIGKVCRTLLAKSVF
SIMKVSRKLLVKSVF

SEQ ID NO: 271679 - protein, 15 aa, Artificial Sequence
  Description of Artificial Sequence: Synthetic peptide
  Seed: SIGKVCRTLLAKSVF
SIMKVSRKLLWKSVF

SEQ ID NO: 271680 - protein, 15 aa, Artificial Sequence
  Description of Artificial Sequence: Synthetic peptide
  Seed: SIGKVCRTLLAKSVF
SIMKVSRKLLYKSVF

SEQ ID NO: 271681 - protein, 15 aa, Artificial Sequence
  Description of Artificial Sequence: Synthetic peptide
  Seed: SIGKVCRTLLAKSVF
SIMKVSRNLLAKSVF

SEQ ID NO: 271682 - protein, 15 aa, Artificial Sequence
  Description of Artificial Sequence: Synthetic peptide
  Seed: SIGKVCRTLLAKSVF
SIMKVSRNLLGKSVF

SEQ ID NO: 271683 - protein, 15 aa, Artificial Sequence
  Description of Artificial Sequence: Synthetic peptide
  Seed: SIGKVCRTLLAKSVF
SIMKVSRNLLQKSVF

SEQ ID NO: 271684 - protein, 15 aa, Artificial Sequence
  Description of Artificial Sequence: Synthetic peptide
  Seed: SIGKVCRTLLAKSVF
SIMKVSRNLLSKSVF

SEQ ID NO: 271685 - protein, 15 aa, Artificial Sequence
  Description of Artificial Sequence: Synthetic peptide
  Seed: SIGKVCRTLLAKSVF
SIMKVSRPLLAKSVF

SEQ ID NO: 271686 - protein, 15 aa, Artificial Sequence
  Description of Artificial Sequence: Synthetic peptide
  Seed: SIGKVCRTLLAKSVF
SIMKVSRPLLQKSVF

SEQ ID NO: 271687 - protein, 15 aa, Artificial Sequence
  Description of Artificial Sequence: Synthetic peptide
  Seed: SIGKVCRTLLAKSVF
SIMKVSRPLLSKSVF

SEQ ID NO: 271688 - protein, 15 aa, Artificial Sequence
  Description of Artificial Sequence: Synthetic peptide
  Seed: SIGKVCRTLLAKSVF
SIMKVSRQLLAKSVF

SEQ ID NO: 271689 - protein, 15 aa, Artificial Sequence
  Description of Artificial Sequence: Synthetic peptide
  Seed: SIGKVCRTLLAKSVF
SIMKVSRQLLSKSVF

SEQ ID NO: 271690 - protein, 15 aa, Artificial Sequence
  Description of Artificial Sequence: Synthetic peptide
  Seed: SIGKVCRTLLAKSVF
SIMKVSRRLLAKSVF

SEQ ID NO: 271691 - protein, 15 aa, Artificial Sequence
  Description of Artificial Sequence: Synthetic peptide
  Seed: SIGKVCRTLLAKSVF
SIMKVSRRLLCKSVF

SEQ ID NO: 271692 - protein, 15 aa, Artificial Sequence
  Description of Artificial Sequence: Synthetic peptide
  Seed: SIGKVCRTLLAKSVF
SIMKVSRRLLDKSVF

SEQ ID NO: 271693 - protein, 15 aa, Artificial Sequence
  Description of Artificial Sequence: Synthetic peptide
  Seed: SIGKVCRTLLAKSVF
SIMKVSRRLLEKSVF

SEQ ID NO: 271694 - protein, 15 aa, Artificial Sequence
  Description of Artificial Sequence: Synthetic peptide
  Seed: SIGKVCRTLLAKSVF
SIMKVSRRLLFKSVF

SEQ ID NO: 271695 - protein, 15 aa, Artificial Sequence
  Description of Artificial Sequence: Synthetic peptide
  Seed: SIGKVCRTLLAKSVF
SIMKVSRRLLGKSVF

SEQ ID NO: 271696 - protein, 15 aa, Artificial Sequence
  Description of Artificial Sequence: Synthetic peptide
  Seed: SIGKVCRTLLAKSVF
SIMKVSRRLLHKSVF

SEQ ID NO: 271697 - protein, 15 aa, Artificial Sequence
  Description of Artificial Sequence: Synthetic peptide
  Seed: SIGKVCRTLLAKSVF
SIMKVSRRLLIKSVF

SEQ ID NO: 271698 - protein, 15 aa, Artificial Sequence
  Description of Artificial Sequence: Synthetic peptide
  Seed: SIGKVCRTLLAKSVF
SIMKVSRRLLKKSVF

SEQ ID NO: 271699 - protein, 15 aa, Artificial Sequence
  Description of Artificial Sequence: Synthetic peptide
  Seed: SIGKVCRTLLAKSVF
SIMKVSRRLLLKSVF

SEQ ID NO: 271700 - protein, 15 aa, Artificial Sequence
  Description of Artificial Sequence: Synthetic peptide
  Seed: SIGKVCRTLLAKSVF
SIMKVSRRLLMKSVF

SEQ ID NO: 271701 - protein, 15 aa, Artificial Sequence
  Description of Artificial Sequence: Synthetic peptide
  Seed: SIGKVCRTLLAKSVF
SIMKVSRRLLNKSVF

SEQ ID NO: 271702 - protein, 15 aa, Artificial Sequence
  Description of Artificial Sequence: Synthetic peptide
  Seed: SIGKVCRTLLAKSVF
SIMKVSRRLLPKSVF

SEQ ID NO: 271703 - protein, 15 aa, Artificial Sequence
  Description of Artificial Sequence: Synthetic peptide
  Seed: SIGKVCRTLLAKSVF
SIMKVSRRLLQKSVF

SEQ ID NO: 271704 - protein, 15 aa, Artificial Sequence
  Description of Artificial Sequence: Synthetic peptide
  Seed: SIGKVCRTLLAKSVF
SIMKVSRRLLRKSVF

SEQ ID NO: 271705 - protein, 15 aa, Artificial Sequence
  Description of Artificial Sequence: Synthetic peptide
  Seed: SIGKVCRTLLAKSVF
SIMKVSRRLLSKSVF

SEQ ID NO: 271706 - protein, 15 aa, Artificial Sequence
  Description of Artificial Sequence: Synthetic peptide
  Seed: SIGKVCRTLLAKSVF
SIMKVSRRLLTKSVF

SEQ ID NO: 271707 - protein, 15 aa, Artificial Sequence
  Description of Artificial Sequence: Synthetic peptide
  Seed: SIGKVCRTLLAKSVF
SIMKVSRRLLVKSVF

SEQ ID NO: 271708 - protein, 15 aa, Artificial Sequence
  Description of Artificial Sequence: Synthetic peptide
  Seed: SIGKVCRTLLAKSVF
SIMKVSRRLLWKSVF

SEQ ID NO: 271709 - protein, 15 aa, Artificial Sequence
  Description of Artificial Sequence: Synthetic peptide
  Seed: SIGKVCRTLLAKSVF
SIMKVSRRLLYKSVF

SEQ ID NO: 271710 - protein, 15 aa, Artificial Sequence
  Description of Artificial Sequence: Synthetic peptide
  Seed: SIGKVCRTLLAKSVF
SIMKVSRSLLAKSVF

SEQ ID NO: 271711 - protein, 15 aa, Artificial Sequence
  Description of Artificial Sequence: Synthetic peptide
  Seed: SIGKVCRTLLAKSVF
SIMKVSRSLLGKSVF

SEQ ID NO: 271712 - protein, 15 aa, Artificial Sequence
  Description of Artificial Sequence: Synthetic peptide
  Seed: SIGKVCRTLLAKSVF
SIMKVSRSLLHKSVF

SEQ ID NO: 271713 - protein, 15 aa, Artificial Sequence
  Description of Artificial Sequence: Synthetic peptide
  Seed: SIGKVCRTLLAKSVF
SIMKVSRSLLQKSVF

SEQ ID NO: 271714 - protein, 15 aa, Artificial Sequence
  Description of Artificial Sequence: Synthetic peptide
  Seed: SIGKVCRTLLAKSVF
SIMKVSRSLLRKSVF

SEQ ID NO: 271715 - protein, 15 aa, Artificial Sequence
  Description of Artificial Sequence: Synthetic peptide
  Seed: SIGKVCRTLLAKSVF
SIMKVSRSLLSKSVF

SEQ ID NO: 271716 - protein, 15 aa, Artificial Sequence
  Description of Artificial Sequence: Synthetic peptide
  Seed: SIGKVCRTLLAKSVF
SIMKVSRSLLYKSVF

SEQ ID NO: 271717 - protein, 15 aa, Artificial Sequence
  Description of Artificial Sequence: Synthetic peptide
  Seed: SIGKVCRTLLAKSVF
SIMKVSRTLLAKSVF

SEQ ID NO: 271718 - protein, 15 aa, Artificial Sequence
  Description of Artificial Sequence: Synthetic peptide
  Seed: SIGKVCRTLLAKSVF
SIMKVSRTLLGKSVF

SEQ ID NO: 271719 - protein, 15 aa, Artificial Sequence
  Description of Artificial Sequence: Synthetic peptide
  Seed: SIGKVCRTLLAKSVF
SIMKVSRTLLHKSVF

SEQ ID NO: 271720 - protein, 15 aa, Artificial Sequence
  Description of Artificial Sequence: Synthetic peptide
  Seed: SIGKVCRTLLAKSVF
SIMKVSRTLLKKSVF

SEQ ID NO: 271721 - protein, 15 aa, Artificial Sequence
  Description of Artificial Sequence: Synthetic peptide
  Seed: SIGKVCRTLLAKSVF
SIMKVSRTLLQKSVF

SEQ ID NO: 271722 - protein, 15 aa, Artificial Sequence
  Description of Artificial Sequence: Synthetic peptide
  Seed: SIGKVCRTLLAKSVF
SIMKVSRTLLRKSVF

SEQ ID NO: 271723 - protein, 15 aa, Artificial Sequence
  Description of Artificial Sequence: Synthetic peptide
  Seed: SIGKVCRTLLAKSVF
SIMKVSRTLLSKSVF

SEQ ID NO: 271724 - protein, 15 aa, Artificial Sequence
  Description of Artificial Sequence: Synthetic peptide
  Seed: SIGKVCRTLLAKSVF
SIMKVSRTLLYKSVF

SEQ ID NO: 271725 - protein, 15 aa, Artificial Sequence
  Description of Artificial Sequence: Synthetic peptide
  Seed: SIGKVCRTLLAKSVF
SIMKVSRVLLAKSVF

SEQ ID NO: 271726 - protein, 15 aa, Artificial Sequence
  Description of Artificial Sequence: Synthetic peptide
  Seed: SIGKVCRTLLAKSVF
SIMKVSRVLLQKSVF

SEQ ID NO: 271727 - protein, 15 aa, Artificial Sequence
  Description of Artificial Sequence: Synthetic peptide
  Seed: SIGKVCRTLLAKSVF
SIMKVSRVLLSKSVF

SEQ ID NO: 271728 - protein, 15 aa, Artificial Sequence
  Description of Artificial Sequence: Synthetic peptide
  Seed: SIGKVCRTLLAKSVF
SIMKVTRALLAKSVF

SEQ ID NO: 271729 - protein, 15 aa, Artificial Sequence
  Description of Artificial Sequence: Synthetic peptide
  Seed: SIGKVCRTLLAKSVF
SIMKVTRALLGKSVF

SEQ ID NO: 271730 - protein, 15 aa, Artificial Sequence
  Description of Artificial Sequence: Synthetic peptide
  Seed: SIGKVCRTLLAKSVF
SIMKVTRALLQKSVF

SEQ ID NO: 271731 - protein, 15 aa, Artificial Sequence
  Description of Artificial Sequence: Synthetic peptide
  Seed: SIGKVCRTLLAKSVF
SIMKVTRALLRKSVF

SEQ ID NO: 271732 - protein, 15 aa, Artificial Sequence
  Description of Artificial Sequence: Synthetic peptide
  Seed: SIGKVCRTLLAKSVF
SIMKVTRALLSKSVF

SEQ ID NO: 271733 - protein, 15 aa, Artificial Sequence
  Description of Artificial Sequence: Synthetic peptide
  Seed: SIGKVCRTLLAKSVF
SIMKVTRGLLGKSVF

SEQ ID NO: 271734 - protein, 15 aa, Artificial Sequence
  Description of Artificial Sequence: Synthetic peptide
  Seed: SIGKVCRTLLAKSVF
SIMKVTRHLLAKSVF

SEQ ID NO: 271735 - protein, 15 aa, Artificial Sequence
  Description of Artificial Sequence: Synthetic peptide
  Seed: SIGKVCRTLLAKSVF
SIMKVTRHLLGKSVF

SEQ ID NO: 271736 - protein, 15 aa, Artificial Sequence
  Description of Artificial Sequence: Synthetic peptide
  Seed: SIGKVCRTLLAKSVF
SIMKVTRHLLHKSVF

SEQ ID NO: 271737 - protein, 15 aa, Artificial Sequence
  Description of Artificial Sequence: Synthetic peptide
  Seed: SIGKVCRTLLAKSVF
SIMKVTRHLLQKSVF

SEQ ID NO: 271738 - protein, 15 aa, Artificial Sequence
  Description of Artificial Sequence: Synthetic peptide
  Seed: SIGKVCRTLLAKSVF
SIMKVTRHLLSKSVF

SEQ ID NO: 271739 - protein, 15 aa, Artificial Sequence
  Description of Artificial Sequence: Synthetic peptide
  Seed: SIGKVCRTLLAKSVF
SIMKVTRHLLTKSVF

SEQ ID NO: 271740 - protein, 15 aa, Artificial Sequence
  Description of Artificial Sequence: Synthetic peptide
  Seed: SIGKVCRTLLAKSVF
SIMKVTRHLLYKSVF

SEQ ID NO: 271741 - protein, 15 aa, Artificial Sequence
  Description of Artificial Sequence: Synthetic peptide
  Seed: SIGKVCRTLLAKSVF
SIMKVTRILLSKSVF

SEQ ID NO: 271742 - protein, 15 aa, Artificial Sequence
  Description of Artificial Sequence: Synthetic peptide
  Seed: SIGKVCRTLLAKSVF
SIMKVTRKLLAKSVF

SEQ ID NO: 271743 - protein, 15 aa, Artificial Sequence
  Description of Artificial Sequence: Synthetic peptide
  Seed: SIGKVCRTLLAKSVF
SIMKVTRKLLCKSVF

SEQ ID NO: 271744 - protein, 15 aa, Artificial Sequence
  Description of Artificial Sequence: Synthetic peptide
  Seed: SIGKVCRTLLAKSVF
SIMKVTRKLLDKSVF

SEQ ID NO: 271745 - protein, 15 aa, Artificial Sequence
  Description of Artificial Sequence: Synthetic peptide
  Seed: SIGKVCRTLLAKSVF
SIMKVTRKLLEKSVF

SEQ ID NO: 271746 - protein, 15 aa, Artificial Sequence
  Description of Artificial Sequence: Synthetic peptide
  Seed: SIGKVCRTLLAKSVF
SIMKVTRKLLFKSVF

SEQ ID NO: 271747 - protein, 15 aa, Artificial Sequence
  Description of Artificial Sequence: Synthetic peptide
  Seed: SIGKVCRTLLAKSVF
SIMKVTRKLLGKSVF

SEQ ID NO: 271748 - protein, 15 aa, Artificial Sequence
  Description of Artificial Sequence: Synthetic peptide
  Seed: SIGKVCRTLLAKSVF
SIMKVTRKLLHKSVF

SEQ ID NO: 271749 - protein, 15 aa, Artificial Sequence
  Description of Artificial Sequence: Synthetic peptide
  Seed: SIGKVCRTLLAKSVF
SIMKVTRKLLIKSVF

SEQ ID NO: 271750 - protein, 15 aa, Artificial Sequence
  Description of Artificial Sequence: Synthetic peptide
  Seed: SIGKVCRTLLAKSVF
SIMKVTRKLLKKSVF

SEQ ID NO: 271751 - protein, 15 aa, Artificial Sequence
  Description of Artificial Sequence: Synthetic peptide
  Seed: SIGKVCRTLLAKSVF
SIMKVTRKLLLKSVF

SEQ ID NO: 271752 - protein, 15 aa, Artificial Sequence
  Description of Artificial Sequence: Synthetic peptide
  Seed: SIGKVCRTLLAKSVF
SIMKVTRKLLMKSVF

SEQ ID NO: 271753 - protein, 15 aa, Artificial Sequence
  Description of Artificial Sequence: Synthetic peptide
  Seed: SIGKVCRTLLAKSVF
SIMKVTRKLLNKSVF

SEQ ID NO: 271754 - protein, 15 aa, Artificial Sequence
  Description of Artificial Sequence: Synthetic peptide
  Seed: SIGKVCRTLLAKSVF
SIMKVTRKLLPKSVF

SEQ ID NO: 271755 - protein, 15 aa, Artificial Sequence
  Description of Artificial Sequence: Synthetic peptide
  Seed: SIGKVCRTLLAKSVF
SIMKVTRKLLQKSVF

SEQ ID NO: 271756 - protein, 15 aa, Artificial Sequence
  Description of Artificial Sequence: Synthetic peptide
  Seed: SIGKVCRTLLAKSVF
SIMKVTRKLLRKSVF

SEQ ID NO: 271757 - protein, 15 aa, Artificial Sequence
  Description of Artificial Sequence: Synthetic peptide
  Seed: SIGKVCRTLLAKSVF
SIMKVTRKLLSKSVF

SEQ ID NO: 271758 - protein, 15 aa, Artificial Sequence
  Description of Artificial Sequence: Synthetic peptide
  Seed: SIGKVCRTLLAKSVF
SIMKVTRKLLTKSVF

SEQ ID NO: 271759 - protein, 15 aa, Artificial Sequence
  Description of Artificial Sequence: Synthetic peptide
  Seed: SIGKVCRTLLAKSVF
SIMKVTRKLLVKSVF

SEQ ID NO: 271760 - protein, 15 aa, Artificial Sequence
  Description of Artificial Sequence: Synthetic peptide
  Seed: SIGKVCRTLLAKSVF
SIMKVTRKLLWKSVF

SEQ ID NO: 271761 - protein, 15 aa, Artificial Sequence
  Description of Artificial Sequence: Synthetic peptide
  Seed: SIGKVCRTLLAKSVF
SIMKVTRKLLYKSVF

SEQ ID NO: 271762 - protein, 15 aa, Artificial Sequence
  Description of Artificial Sequence: Synthetic peptide
  Seed: SIGKVCRTLLAKSVF
SIMKVTRNLLAKSVF

SEQ ID NO: 271763 - protein, 15 aa, Artificial Sequence
  Description of Artificial Sequence: Synthetic peptide
  Seed: SIGKVCRTLLAKSVF
SIMKVTRNLLGKSVF

SEQ ID NO: 271764 - protein, 15 aa, Artificial Sequence
  Description of Artificial Sequence: Synthetic peptide
  Seed: SIGKVCRTLLAKSVF
SIMKVTRNLLQKSVF

SEQ ID NO: 271765 - protein, 15 aa, Artificial Sequence
  Description of Artificial Sequence: Synthetic peptide
  Seed: SIGKVCRTLLAKSVF
SIMKVTRNLLSKSVF

SEQ ID NO: 271766 - protein, 15 aa, Artificial Sequence
  Description of Artificial Sequence: Synthetic peptide
  Seed: SIGKVCRTLLAKSVF
SIMKVTRPLLAKSVF

SEQ ID NO: 271767 - protein, 15 aa, Artificial Sequence
  Description of Artificial Sequence: Synthetic peptide
  Seed: SIGKVCRTLLAKSVF
SIMKVTRPLLGKSVF

SEQ ID NO: 271768 - protein, 15 aa, Artificial Sequence
  Description of Artificial Sequence: Synthetic peptide
  Seed: SIGKVCRTLLAKSVF
SIMKVTRPLLQKSVF

SEQ ID NO: 271769 - protein, 15 aa, Artificial Sequence
  Description of Artificial Sequence: Synthetic peptide
  Seed: SIGKVCRTLLAKSVF
SIMKVTRPLLSKSVF

SEQ ID NO: 271770 - protein, 15 aa, Artificial Sequence
  Description of Artificial Sequence: Synthetic peptide
  Seed: SIGKVCRTLLAKSVF
SIMKVTRQLLAKSVF

SEQ ID NO: 271771 - protein, 15 aa, Artificial Sequence
  Description of Artificial Sequence: Synthetic peptide
  Seed: SIGKVCRTLLAKSVF
SIMKVTRQLLGKSVF

SEQ ID NO: 271772 - protein, 15 aa, Artificial Sequence
  Description of Artificial Sequence: Synthetic peptide
  Seed: SIGKVCRTLLAKSVF
SIMKVTRQLLSKSVF

SEQ ID NO: 271773 - protein, 15 aa, Artificial Sequence
  Description of Artificial Sequence: Synthetic peptide
  Seed: SIGKVCRTLLAKSVF
SIMKVTRRLLAKSVF

SEQ ID NO: 271774 - protein, 15 aa, Artificial Sequence
  Description of Artificial Sequence: Synthetic peptide
  Seed: SIGKVCRTLLAKSVF
SIMKVTRRLLCKSVF

SEQ ID NO: 271775 - protein, 15 aa, Artificial Sequence
  Description of Artificial Sequence: Synthetic peptide
  Seed: SIGKVCRTLLAKSVF
SIMKVTRRLLDKSVF

SEQ ID NO: 271776 - protein, 15 aa, Artificial Sequence
  Description of Artificial Sequence: Synthetic peptide
  Seed: SIGKVCRTLLAKSVF
SIMKVTRRLLEKSVF

SEQ ID NO: 271777 - protein, 15 aa, Artificial Sequence
  Description of Artificial Sequence: Synthetic peptide
  Seed: SIGKVCRTLLAKSVF
SIMKVTRRLLFKSVF

SEQ ID NO: 271778 - protein, 15 aa, Artificial Sequence
  Description of Artificial Sequence: Synthetic peptide
  Seed: SIGKVCRTLLAKSVF
SIMKVTRRLLGKSVF

SEQ ID NO: 271779 - protein, 15 aa, Artificial Sequence
  Description of Artificial Sequence: Synthetic peptide
  Seed: SIGKVCRTLLAKSVF
SIMKVTRRLLHKSVF

SEQ ID NO: 271780 - protein, 15 aa, Artificial Sequence
  Description of Artificial Sequence: Synthetic peptide
  Seed: SIGKVCRTLLAKSVF
SIMKVTRRLLIKSVF

SEQ ID NO: 271781 - protein, 15 aa, Artificial Sequence
  Description of Artificial Sequence: Synthetic peptide
  Seed: SIGKVCRTLLAKSVF
SIMKVTRRLLKKSVF

SEQ ID NO: 271782 - protein, 15 aa, Artificial Sequence
  Description of Artificial Sequence: Synthetic peptide
  Seed: SIGKVCRTLLAKSVF
SIMKVTRRLLLKSVF

SEQ ID NO: 271783 - protein, 15 aa, Artificial Sequence
  Description of Artificial Sequence: Synthetic peptide
  Seed: SIGKVCRTLLAKSVF
SIMKVTRRLLMKSVF

SEQ ID NO: 271784 - protein, 15 aa, Artificial Sequence
  Description of Artificial Sequence: Synthetic peptide
  Seed: SIGKVCRTLLAKSVF
SIMKVTRRLLNKSVF

SEQ ID NO: 271785 - protein, 15 aa, Artificial Sequence
  Description of Artificial Sequence: Synthetic peptide
  Seed: SIGKVCRTLLAKSVF
SIMKVTRRLLPKSVF

SEQ ID NO: 271786 - protein, 15 aa, Artificial Sequence
  Description of Artificial Sequence: Synthetic peptide
  Seed: SIGKVCRTLLAKSVF
SIMKVTRRLLQKSVF

SEQ ID NO: 271787 - protein, 15 aa, Artificial Sequence
  Description of Artificial Sequence: Synthetic peptide
  Seed: SIGKVCRTLLAKSVF
SIMKVTRRLLRKSVF

SEQ ID NO: 271788 - protein, 15 aa, Artificial Sequence
  Description of Artificial Sequence: Synthetic peptide
  Seed: SIGKVCRTLLAKSVF
SIMKVTRRLLSKSVF

SEQ ID NO: 271789 - protein, 15 aa, Artificial Sequence
  Description of Artificial Sequence: Synthetic peptide
  Seed: SIGKVCRTLLAKSVF
SIMKVTRRLLTKSVF

SEQ ID NO: 271790 - protein, 15 aa, Artificial Sequence
  Description of Artificial Sequence: Synthetic peptide
  Seed: SIGKVCRTLLAKSVF
SIMKVTRRLLVKSVF

SEQ ID NO: 271791 - protein, 15 aa, Artificial Sequence
  Description of Artificial Sequence: Synthetic peptide
  Seed: SIGKVCRTLLAKSVF
SIMKVTRRLLWKSVF

SEQ ID NO: 271792 - protein, 15 aa, Artificial Sequence
  Description of Artificial Sequence: Synthetic peptide
  Seed: SIGKVCRTLLAKSVF
SIMKVTRRLLYKSVF

SEQ ID NO: 271793 - protein, 15 aa, Artificial Sequence
  Description of Artificial Sequence: Synthetic peptide
  Seed: SIGKVCRTLLAKSVF
SIMKVTRSLLAKSVF

SEQ ID NO: 271794 - protein, 15 aa, Artificial Sequence
  Description of Artificial Sequence: Synthetic peptide
  Seed: SIGKVCRTLLAKSVF
SIMKVTRSLLGKSVF

SEQ ID NO: 271795 - protein, 15 aa, Artificial Sequence
  Description of Artificial Sequence: Synthetic peptide
  Seed: SIGKVCRTLLAKSVF
SIMKVTRSLLHKSVF

SEQ ID NO: 271796 - protein, 15 aa, Artificial Sequence
  Description of Artificial Sequence: Synthetic peptide
  Seed: SIGKVCRTLLAKSVF
SIMKVTRSLLQKSVF

SEQ ID NO: 271797 - protein, 15 aa, Artificial Sequence
  Description of Artificial Sequence: Synthetic peptide
  Seed: SIGKVCRTLLAKSVF
SIMKVTRSLLRKSVF

SEQ ID NO: 271798 - protein, 15 aa, Artificial Sequence
  Description of Artificial Sequence: Synthetic peptide
  Seed: SIGKVCRTLLAKSVF
SIMKVTRSLLSKSVF

SEQ ID NO: 271799 - protein, 15 aa, Artificial Sequence
  Description of Artificial Sequence: Synthetic peptide
  Seed: SIGKVCRTLLAKSVF
SIMKVTRSLLYKSVF

SEQ ID NO: 271800 - protein, 15 aa, Artificial Sequence
  Description of Artificial Sequence: Synthetic peptide
  Seed: SIGKVCRTLLAKSVF
SIMKVTRTLLAKSVF

SEQ ID NO: 271801 - protein, 15 aa, Artificial Sequence
  Description of Artificial Sequence: Synthetic peptide
  Seed: SIGKVCRTLLAKSVF
SIMKVTRTLLGKSVF

SEQ ID NO: 271802 - protein, 15 aa, Artificial Sequence
  Description of Artificial Sequence: Synthetic peptide
  Seed: SIGKVCRTLLAKSVF
SIMKVTRTLLHKSVF

SEQ ID NO: 271803 - protein, 15 aa, Artificial Sequence
  Description of Artificial Sequence: Synthetic peptide
  Seed: SIGKVCRTLLAKSVF
SIMKVTRTLLKKSVF

SEQ ID NO: 271804 - protein, 15 aa, Artificial Sequence
  Description of Artificial Sequence: Synthetic peptide
  Seed: SIGKVCRTLLAKSVF
SIMKVTRTLLQKSVF

SEQ ID NO: 271805 - protein, 15 aa, Artificial Sequence
  Description of Artificial Sequence: Synthetic peptide
  Seed: SIGKVCRTLLAKSVF
SIMKVTRTLLRKSVF

SEQ ID NO: 271806 - protein, 15 aa, Artificial Sequence
  Description of Artificial Sequence: Synthetic peptide
  Seed: SIGKVCRTLLAKSVF
SIMKVTRTLLSKSVF

SEQ ID NO: 271807 - protein, 15 aa, Artificial Sequence
  Description of Artificial Sequence: Synthetic peptide
  Seed: SIGKVCRTLLAKSVF
SIMKVTRVLLHKSVF

SEQ ID NO: 271808 - protein, 15 aa, Artificial Sequence
  Description of Artificial Sequence: Synthetic peptide
  Seed: SIGKVCRTLLAKSVF
SIMKVTRVLLRKSVF

SEQ ID NO: 271809 - protein, 15 aa, Artificial Sequence
  Description of Artificial Sequence: Synthetic peptide
  Seed: SIGKVCRTLLAKSVF
SIMKVTRVLLSKSVF

SEQ ID NO: 271810 - protein, 15 aa, Artificial Sequence
  Description of Artificial Sequence: Synthetic peptide
  Seed: SIGKVCRTLLAKSVF
SIMKVVRALLAKSVF

SEQ ID NO: 271811 - protein, 15 aa, Artificial Sequence
  Description of Artificial Sequence: Synthetic peptide
  Seed: SIGKVCRTLLAKSVF
SIMKVVRALLGKSVF

SEQ ID NO: 271812 - protein, 15 aa, Artificial Sequence
  Description of Artificial Sequence: Synthetic peptide
  Seed: SIGKVCRTLLAKSVF
SIMKVVRALLHKSVF

SEQ ID NO: 271813 - protein, 15 aa, Artificial Sequence
  Description of Artificial Sequence: Synthetic peptide
  Seed: SIGKVCRTLLAKSVF
SIMKVVRALLNKSVF

SEQ ID NO: 271814 - protein, 15 aa, Artificial Sequence
  Description of Artificial Sequence: Synthetic peptide
  Seed: SIGKVCRTLLAKSVF
SIMKVVRALLQKSVF

SEQ ID NO: 271815 - protein, 15 aa, Artificial Sequence
  Description of Artificial Sequence: Synthetic peptide
  Seed: SIGKVCRTLLAKSVF
SIMKVVRALLSKSVF

SEQ ID NO: 271816 - protein, 15 aa, Artificial Sequence
  Description of Artificial Sequence: Synthetic peptide
  Seed: SIGKVCRTLLAKSVF
SIMKVVRALLTKSVF

SEQ ID NO: 271817 - protein, 15 aa, Artificial Sequence
  Description of Artificial Sequence: Synthetic peptide
  Seed: SIGKVCRTLLAKSVF
SIMKVVRALLYKSVF

SEQ ID NO: 271818 - protein, 15 aa, Artificial Sequence
  Description of Artificial Sequence: Synthetic peptide
  Seed: SIGKVCRTLLAKSVF
SIMKVVRGLLAKSVF

SEQ ID NO: 271819 - protein, 15 aa, Artificial Sequence
  Description of Artificial Sequence: Synthetic peptide
  Seed: SIGKVCRTLLAKSVF
SIMKVVRGLLGKSVF

SEQ ID NO: 271820 - protein, 15 aa, Artificial Sequence
  Description of Artificial Sequence: Synthetic peptide
  Seed: SIGKVCRTLLAKSVF
SIMKVVRGLLHKSVF

SEQ ID NO: 271821 - protein, 15 aa, Artificial Sequence
  Description of Artificial Sequence: Synthetic peptide
  Seed: SIGKVCRTLLAKSVF
SIMKVVRGLLNKSVF

SEQ ID NO: 271822 - protein, 15 aa, Artificial Sequence
  Description of Artificial Sequence: Synthetic peptide
  Seed: SIGKVCRTLLAKSVF
SIMKVVRGLLQKSVF

SEQ ID NO: 271823 - protein, 15 aa, Artificial Sequence
  Description of Artificial Sequence: Synthetic peptide
  Seed: SIGKVCRTLLAKSVF
SIMKVVRGLLSKSVF

SEQ ID NO: 271824 - protein, 15 aa, Artificial Sequence
  Description of Artificial Sequence: Synthetic peptide
  Seed: SIGKVCRTLLAKSVF
SIMKVVRGLLTKSVF

SEQ ID NO: 271825 - protein, 15 aa, Artificial Sequence
  Description of Artificial Sequence: Synthetic peptide
  Seed: SIGKVCRTLLAKSVF
SIMKVVRHLLAKSVF

SEQ ID NO: 271826 - protein, 15 aa, Artificial Sequence
  Description of Artificial Sequence: Synthetic peptide
  Seed: SIGKVCRTLLAKSVF
SIMKVVRHLLGKSVF

SEQ ID NO: 271827 - protein, 15 aa, Artificial Sequence
  Description of Artificial Sequence: Synthetic peptide
  Seed: SIGKVCRTLLAKSVF
SIMKVVRHLLHKSVF

SEQ ID NO: 271828 - protein, 15 aa, Artificial Sequence
  Description of Artificial Sequence: Synthetic peptide
  Seed: SIGKVCRTLLAKSVF
SIMKVVRHLLIKSVF

SEQ ID NO: 271829 - protein, 15 aa, Artificial Sequence
  Description of Artificial Sequence: Synthetic peptide
  Seed: SIGKVCRTLLAKSVF
SIMKVVRHLLKKSVF

SEQ ID NO: 271830 - protein, 15 aa, Artificial Sequence
  Description of Artificial Sequence: Synthetic peptide
  Seed: SIGKVCRTLLAKSVF
SIMKVVRHLLLKSVF

SEQ ID NO: 271831 - protein, 15 aa, Artificial Sequence
  Description of Artificial Sequence: Synthetic peptide
  Seed: SIGKVCRTLLAKSVF
SIMKVVRHLLMKSVF

SEQ ID NO: 271832 - protein, 15 aa, Artificial Sequence
  Description of Artificial Sequence: Synthetic peptide
  Seed: SIGKVCRTLLAKSVF
SIMKVVRHLLNKSVF

SEQ ID NO: 271833 - protein, 15 aa, Artificial Sequence
  Description of Artificial Sequence: Synthetic peptide
  Seed: SIGKVCRTLLAKSVF
SIMKVVRHLLPKSVF

SEQ ID NO: 271834 - protein, 15 aa, Artificial Sequence
  Description of Artificial Sequence: Synthetic peptide
  Seed: SIGKVCRTLLAKSVF
SIMKVVRHLLQKSVF

SEQ ID NO: 271835 - protein, 15 aa, Artificial Sequence
  Description of Artificial Sequence: Synthetic peptide
  Seed: SIGKVCRTLLAKSVF
SIMKVVRHLLRKSVF

SEQ ID NO: 271836 - protein, 15 aa, Artificial Sequence
  Description of Artificial Sequence: Synthetic peptide
  Seed: SIGKVCRTLLAKSVF
SIMKVVRHLLSKSVF

SEQ ID NO: 271837 - protein, 15 aa, Artificial Sequence
  Description of Artificial Sequence: Synthetic peptide
  Seed: SIGKVCRTLLAKSVF
SIMKVVRHLLTKSVF

SEQ ID NO: 271838 - protein, 15 aa, Artificial Sequence
  Description of Artificial Sequence: Synthetic peptide
  Seed: SIGKVCRTLLAKSVF
SIMKVVRHLLVKSVF

SEQ ID NO: 271839 - protein, 15 aa, Artificial Sequence
  Description of Artificial Sequence: Synthetic peptide
  Seed: SIGKVCRTLLAKSVF
SIMKVVRHLLYKSVF

SEQ ID NO: 271840 - protein, 15 aa, Artificial Sequence
  Description of Artificial Sequence: Synthetic peptide
  Seed: SIGKVCRTLLAKSVF
SIMKVVRILLSKSVF

SEQ ID NO: 271841 - protein, 15 aa, Artificial Sequence
  Description of Artificial Sequence: Synthetic peptide
  Seed: SIGKVCRTLLAKSVF
SIMKVVRKLLAKSVF

SEQ ID NO: 271842 - protein, 15 aa, Artificial Sequence
  Description of Artificial Sequence: Synthetic peptide
  Seed: SIGKVCRTLLAKSVF
SIMKVVRKLLCKSVF

SEQ ID NO: 271843 - protein, 15 aa, Artificial Sequence
  Description of Artificial Sequence: Synthetic peptide
  Seed: SIGKVCRTLLAKSVF
SIMKVVRKLLDKSVF

SEQ ID NO: 271844 - protein, 15 aa, Artificial Sequence
  Description of Artificial Sequence: Synthetic peptide
  Seed: SIGKVCRTLLAKSVF
SIMKVVRKLLEKSVF

SEQ ID NO: 271845 - protein, 15 aa, Artificial Sequence
  Description of Artificial Sequence: Synthetic peptide
  Seed: SIGKVCRTLLAKSVF
SIMKVVRKLLFKSVF

SEQ ID NO: 271846 - protein, 15 aa, Artificial Sequence
  Description of Artificial Sequence: Synthetic peptide
  Seed: SIGKVCRTLLAKSVF
SIMKVVRKLLGKSVF

SEQ ID NO: 271847 - protein, 15 aa, Artificial Sequence
  Description of Artificial Sequence: Synthetic peptide
  Seed: SIGKVCRTLLAKSVF
SIMKVVRKLLHKSVF

SEQ ID NO: 271848 - protein, 15 aa, Artificial Sequence
  Description of Artificial Sequence: Synthetic peptide
  Seed: SIGKVCRTLLAKSVF
SIMKVVRKLLIKSVF

SEQ ID NO: 271849 - protein, 15 aa, Artificial Sequence
  Description of Artificial Sequence: Synthetic peptide
  Seed: SIGKVCRTLLAKSVF
SIMKVVRKLLKKSVF

SEQ ID NO: 271850 - protein, 15 aa, Artificial Sequence
  Description of Artificial Sequence: Synthetic peptide
  Seed: SIGKVCRTLLAKSVF
SIMKVVRKLLLKSVF

SEQ ID NO: 271851 - protein, 15 aa, Artificial Sequence
  Description of Artificial Sequence: Synthetic peptide
  Seed: SIGKVCRTLLAKSVF
SIMKVVRKLLMKSVF

SEQ ID NO: 271852 - protein, 15 aa, Artificial Sequence
  Description of Artificial Sequence: Synthetic peptide
  Seed: SIGKVCRTLLAKSVF
SIMKVVRKLLNKSVF

SEQ ID NO: 271853 - protein, 15 aa, Artificial Sequence
  Description of Artificial Sequence: Synthetic peptide
  Seed: SIGKVCRTLLAKSVF
SIMKVVRKLLPKSVF

SEQ ID NO: 271854 - protein, 15 aa, Artificial Sequence
  Description of Artificial Sequence: Synthetic peptide
  Seed: SIGKVCRTLLAKSVF
SIMKVVRKLLQKSVF

SEQ ID NO: 271855 - protein, 15 aa, Artificial Sequence
  Description of Artificial Sequence: Synthetic peptide
  Seed: SIGKVCRTLLAKSVF
SIMKVVRKLLRKSVF

SEQ ID NO: 271856 - protein, 15 aa, Artificial Sequence
  Description of Artificial Sequence: Synthetic peptide
  Seed: SIGKVCRTLLAKSVF
SIMKVVRKLLSKSVF

SEQ ID NO: 271857 - protein, 15 aa, Artificial Sequence
  Description of Artificial Sequence: Synthetic peptide
  Seed: SIGKVCRTLLAKSVF
SIMKVVRKLLTKSVF

SEQ ID NO: 271858 - protein, 15 aa, Artificial Sequence
  Description of Artificial Sequence: Synthetic peptide
  Seed: SIGKVCRTLLAKSVF
SIMKVVRKLLVKSVF

SEQ ID NO: 271859 - protein, 15 aa, Artificial Sequence
  Description of Artificial Sequence: Synthetic peptide
  Seed: SIGKVCRTLLAKSVF
SIMKVVRKLLWKSVF

SEQ ID NO: 271860 - protein, 15 aa, Artificial Sequence
  Description of Artificial Sequence: Synthetic peptide
  Seed: SIGKVCRTLLAKSVF
SIMKVVRKLLYKSVF

SEQ ID NO: 271861 - protein, 15 aa, Artificial Sequence
  Description of Artificial Sequence: Synthetic peptide
  Seed: SIGKVCRTLLAKSVF
SIMKVVRNLLAKSVF

SEQ ID NO: 271862 - protein, 15 aa, Artificial Sequence
  Description of Artificial Sequence: Synthetic peptide
  Seed: SIGKVCRTLLAKSVF
SIMKVVRNLLGKSVF

SEQ ID NO: 271863 - protein, 15 aa, Artificial Sequence
  Description of Artificial Sequence: Synthetic peptide
  Seed: SIGKVCRTLLAKSVF
SIMKVVRNLLHKSVF

SEQ ID NO: 271864 - protein, 15 aa, Artificial Sequence
  Description of Artificial Sequence: Synthetic peptide
  Seed: SIGKVCRTLLAKSVF
SIMKVVRNLLNKSVF

SEQ ID NO: 271865 - protein, 15 aa, Artificial Sequence
  Description of Artificial Sequence: Synthetic peptide
  Seed: SIGKVCRTLLAKSVF
SIMKVVRNLLQKSVF

SEQ ID NO: 271866 - protein, 15 aa, Artificial Sequence
  Description of Artificial Sequence: Synthetic peptide
  Seed: SIGKVCRTLLAKSVF
SIMKVVRNLLRKSVF

SEQ ID NO: 271867 - protein, 15 aa, Artificial Sequence
  Description of Artificial Sequence: Synthetic peptide
  Seed: SIGKVCRTLLAKSVF
SIMKVVRNLLSKSVF

SEQ ID NO: 271868 - protein, 15 aa, Artificial Sequence
  Description of Artificial Sequence: Synthetic peptide
  Seed: SIGKVCRTLLAKSVF
SIMKVVRNLLTKSVF

SEQ ID NO: 271869 - protein, 15 aa, Artificial Sequence
  Description of Artificial Sequence: Synthetic peptide
  Seed: SIGKVCRTLLAKSVF
SIMKVVRPLLAKSVF

SEQ ID NO: 271870 - protein, 15 aa, Artificial Sequence
  Description of Artificial Sequence: Synthetic peptide
  Seed: SIGKVCRTLLAKSVF
SIMKVVRPLLGKSVF

SEQ ID NO: 271871 - protein, 15 aa, Artificial Sequence
  Description of Artificial Sequence: Synthetic peptide
  Seed: SIGKVCRTLLAKSVF
SIMKVVRPLLMKSVF

SEQ ID NO: 271872 - protein, 15 aa, Artificial Sequence
  Description of Artificial Sequence: Synthetic peptide
  Seed: SIGKVCRTLLAKSVF
SIMKVVRPLLNKSVF

SEQ ID NO: 271873 - protein, 15 aa, Artificial Sequence
  Description of Artificial Sequence: Synthetic peptide
  Seed: SIGKVCRTLLAKSVF
SIMKVVRPLLQKSVF

SEQ ID NO: 271874 - protein, 15 aa, Artificial Sequence
  Description of Artificial Sequence: Synthetic peptide
  Seed: SIGKVCRTLLAKSVF
SIMKVVRPLLSKSVF

SEQ ID NO: 271875 - protein, 15 aa, Artificial Sequence
  Description of Artificial Sequence: Synthetic peptide
  Seed: SIGKVCRTLLAKSVF
SIMKVVRPLLTKSVF

SEQ ID NO: 271876 - protein, 15 aa, Artificial Sequence
  Description of Artificial Sequence: Synthetic peptide
  Seed: SIGKVCRTLLAKSVF
SIMKVVRPLLVKSVF

SEQ ID NO: 271877 - protein, 15 aa, Artificial Sequence
  Description of Artificial Sequence: Synthetic peptide
  Seed: SIGKVCRTLLAKSVF
SIMKVVRPLLYKSVF

SEQ ID NO: 271878 - protein, 15 aa, Artificial Sequence
  Description of Artificial Sequence: Synthetic peptide
  Seed: SIGKVCRTLLAKSVF
SIMKVVRQLLAKSVF

SEQ ID NO: 271879 - protein, 15 aa, Artificial Sequence
  Description of Artificial Sequence: Synthetic peptide
  Seed: SIGKVCRTLLAKSVF
SIMKVVRQLLGKSVF

SEQ ID NO: 271880 - protein, 15 aa, Artificial Sequence
  Description of Artificial Sequence: Synthetic peptide
  Seed: SIGKVCRTLLAKSVF
SIMKVVRQLLHKSVF

SEQ ID NO: 271881 - protein, 15 aa, Artificial Sequence
  Description of Artificial Sequence: Synthetic peptide
  Seed: SIGKVCRTLLAKSVF
SIMKVVRQLLQKSVF

SEQ ID NO: 271882 - protein, 15 aa, Artificial Sequence
  Description of Artificial Sequence: Synthetic peptide
  Seed: SIGKVCRTLLAKSVF
SIMKVVRQLLSKSVF

SEQ ID NO: 271883 - protein, 15 aa, Artificial Sequence
  Description of Artificial Sequence: Synthetic peptide
  Seed: SIGKVCRTLLAKSVF
SIMKVVRRLLAKSVF

SEQ ID NO: 271884 - protein, 15 aa, Artificial Sequence
  Description of Artificial Sequence: Synthetic peptide
  Seed: SIGKVCRTLLAKSVF
SIMKVVRRLLCKSVF

SEQ ID NO: 271885 - protein, 15 aa, Artificial Sequence
  Description of Artificial Sequence: Synthetic peptide
  Seed: SIGKVCRTLLAKSVF
SIMKVVRRLLDKSVF

SEQ ID NO: 271886 - protein, 15 aa, Artificial Sequence
  Description of Artificial Sequence: Synthetic peptide
  Seed: SIGKVCRTLLAKSVF
SIMKVVRRLLEKSVF

SEQ ID NO: 271887 - protein, 15 aa, Artificial Sequence
  Description of Artificial Sequence: Synthetic peptide
  Seed: SIGKVCRTLLAKSVF
SIMKVVRRLLFKSVF

SEQ ID NO: 271888 - protein, 15 aa, Artificial Sequence
  Description of Artificial Sequence: Synthetic peptide
  Seed: SIGKVCRTLLAKSVF
SIMKVVRRLLGKSVF

SEQ ID NO: 271889 - protein, 15 aa, Artificial Sequence
  Description of Artificial Sequence: Synthetic peptide
  Seed: SIGKVCRTLLAKSVF
SIMKVVRRLLHKSVF

SEQ ID NO: 271890 - protein, 15 aa, Artificial Sequence
  Description of Artificial Sequence: Synthetic peptide
  Seed: SIGKVCRTLLAKSVF
SIMKVVRRLLIKSVF

SEQ ID NO: 271891 - protein, 15 aa, Artificial Sequence
  Description of Artificial Sequence: Synthetic peptide
  Seed: SIGKVCRTLLAKSVF
SIMKVVRRLLKKSVF

SEQ ID NO: 271892 - protein, 15 aa, Artificial Sequence
  Description of Artificial Sequence: Synthetic peptide
  Seed: SIGKVCRTLLAKSVF
SIMKVVRRLLLKSVF

SEQ ID NO: 271893 - protein, 15 aa, Artificial Sequence
  Description of Artificial Sequence: Synthetic peptide
  Seed: SIGKVCRTLLAKSVF
SIMKVVRRLLMKSVF

SEQ ID NO: 271894 - protein, 15 aa, Artificial Sequence
  Description of Artificial Sequence: Synthetic peptide
  Seed: SIGKVCRTLLAKSVF
SIMKVVRRLLNKSVF

SEQ ID NO: 271895 - protein, 15 aa, Artificial Sequence
  Description of Artificial Sequence: Synthetic peptide
  Seed: SIGKVCRTLLAKSVF
SIMKVVRRLLPKSVF

SEQ ID NO: 271896 - protein, 15 aa, Artificial Sequence
  Description of Artificial Sequence: Synthetic peptide
  Seed: SIGKVCRTLLAKSVF
SIMKVVRRLLQKSVF

SEQ ID NO: 271897 - protein, 15 aa, Artificial Sequence
  Description of Artificial Sequence: Synthetic peptide
  Seed: SIGKVCRTLLAKSVF
SIMKVVRRLLRKSVF

SEQ ID NO: 271898 - protein, 15 aa, Artificial Sequence
  Description of Artificial Sequence: Synthetic peptide
  Seed: SIGKVCRTLLAKSVF
SIMKVVRRLLSKSVF

SEQ ID NO: 271899 - protein, 15 aa, Artificial Sequence
  Description of Artificial Sequence: Synthetic peptide
  Seed: SIGKVCRTLLAKSVF
SIMKVVRRLLTKSVF

SEQ ID NO: 271900 - protein, 15 aa, Artificial Sequence
  Description of Artificial Sequence: Synthetic peptide
  Seed: SIGKVCRTLLAKSVF
SIMKVVRRLLVKSVF

SEQ ID NO: 271901 - protein, 15 aa, Artificial Sequence
  Description of Artificial Sequence: Synthetic peptide
  Seed: SIGKVCRTLLAKSVF
SIMKVVRRLLWKSVF

SEQ ID NO: 271902 - protein, 15 aa, Artificial Sequence
  Description of Artificial Sequence: Synthetic peptide
  Seed: SIGKVCRTLLAKSVF
SIMKVVRRLLYKSVF

SEQ ID NO: 271903 - protein, 15 aa, Artificial Sequence
  Description of Artificial Sequence: Synthetic peptide
  Seed: SIGKVCRTLLAKSVF
SIMKVVRSLLAKSVF

SEQ ID NO: 271904 - protein, 15 aa, Artificial Sequence
  Description of Artificial Sequence: Synthetic peptide
  Seed: SIGKVCRTLLAKSVF
SIMKVVRSLLDKSVF

SEQ ID NO: 271905 - protein, 15 aa, Artificial Sequence
  Description of Artificial Sequence: Synthetic peptide
  Seed: SIGKVCRTLLAKSVF
SIMKVVRSLLGKSVF

SEQ ID NO: 271906 - protein, 15 aa, Artificial Sequence
  Description of Artificial Sequence: Synthetic peptide
  Seed: SIGKVCRTLLAKSVF
SIMKVVRSLLHKSVF

SEQ ID NO: 271907 - protein, 15 aa, Artificial Sequence
  Description of Artificial Sequence: Synthetic peptide
  Seed: SIGKVCRTLLAKSVF
SIMKVVRSLLNKSVF

SEQ ID NO: 271908 - protein, 15 aa, Artificial Sequence
  Description of Artificial Sequence: Synthetic peptide
  Seed: SIGKVCRTLLAKSVF
SIMKVVRSLLPKSVF

SEQ ID NO: 271909 - protein, 15 aa, Artificial Sequence
  Description of Artificial Sequence: Synthetic peptide
  Seed: SIGKVCRTLLAKSVF
SIMKVVRSLLQKSVF

SEQ ID NO: 271910 - protein, 15 aa, Artificial Sequence
  Description of Artificial Sequence: Synthetic peptide
  Seed: SIGKVCRTLLAKSVF
SIMKVVRSLLSKSVF

SEQ ID NO: 271911 - protein, 15 aa, Artificial Sequence
  Description of Artificial Sequence: Synthetic peptide
  Seed: SIGKVCRTLLAKSVF
SIMKVVRSLLTKSVF

SEQ ID NO: 271912 - protein, 15 aa, Artificial Sequence
  Description of Artificial Sequence: Synthetic peptide
  Seed: SIGKVCRTLLAKSVF
SIMKVVRSLLYKSVF

SEQ ID NO: 271913 - protein, 15 aa, Artificial Sequence
  Description of Artificial Sequence: Synthetic peptide
  Seed: SIGKVCRTLLAKSVF
SIMKVVRTLLAKSVF

SEQ ID NO: 271914 - protein, 15 aa, Artificial Sequence
  Description of Artificial Sequence: Synthetic peptide
  Seed: SIGKVCRTLLAKSVF
SIMKVVRTLLDKSVF

SEQ ID NO: 271915 - protein, 15 aa, Artificial Sequence
  Description of Artificial Sequence: Synthetic peptide
  Seed: SIGKVCRTLLAKSVF
SIMKVVRTLLGKSVF

SEQ ID NO: 271916 - protein, 15 aa, Artificial Sequence
  Description of Artificial Sequence: Synthetic peptide
  Seed: SIGKVCRTLLAKSVF
SIMKVVRTLLHKSVF

SEQ ID NO: 271917 - protein, 15 aa, Artificial Sequence
  Description of Artificial Sequence: Synthetic peptide
  Seed: SIGKVCRTLLAKSVF
SIMKVVRTLLKKSVF

SEQ ID NO: 271918 - protein, 15 aa, Artificial Sequence
  Description of Artificial Sequence: Synthetic peptide
  Seed: SIGKVCRTLLAKSVF
SIMKVVRTLLNKSVF

SEQ ID NO: 271919 - protein, 15 aa, Artificial Sequence
  Description of Artificial Sequence: Synthetic peptide
  Seed: SIGKVCRTLLAKSVF
SIMKVVRTLLQKSVF

SEQ ID NO: 271920 - protein, 15 aa, Artificial Sequence
  Description of Artificial Sequence: Synthetic peptide
  Seed: SIGKVCRTLLAKSVF
SIMKVVRTLLRKSVF

SEQ ID NO: 271921 - protein, 15 aa, Artificial Sequence
  Description of Artificial Sequence: Synthetic peptide
  Seed: SIGKVCRTLLAKSVF
SIMKVVRTLLSKSVF

SEQ ID NO: 271922 - protein, 15 aa, Artificial Sequence
  Description of Artificial Sequence: Synthetic peptide
  Seed: SIGKVCRTLLAKSVF
SIMKVVRTLLTKSVF

SEQ ID NO: 271923 - protein, 15 aa, Artificial Sequence
  Description of Artificial Sequence: Synthetic peptide
  Seed: SIGKVCRTLLAKSVF
SIMKVVRVLLSKSVF

SEQ ID NO: 271924 - protein, 15 aa, Artificial Sequence
  Description of Artificial Sequence: Synthetic peptide
  Seed: SIGKVCRTLLAKSVF
SIMKVWRALLAKSVF

SEQ ID NO: 271925 - protein, 15 aa, Artificial Sequence
  Description of Artificial Sequence: Synthetic peptide
  Seed: SIGKVCRTLLAKSVF
SIMKVWRALLGKSVF

SEQ ID NO: 271926 - protein, 15 aa, Artificial Sequence
  Description of Artificial Sequence: Synthetic peptide
  Seed: SIGKVCRTLLAKSVF
SIMKVWRALLHKSVF

SEQ ID NO: 271927 - protein, 15 aa, Artificial Sequence
  Description of Artificial Sequence: Synthetic peptide
  Seed: SIGKVCRTLLAKSVF
SIMKVWRALLKKSVF

SEQ ID NO: 271928 - protein, 15 aa, Artificial Sequence
  Description of Artificial Sequence: Synthetic peptide
  Seed: SIGKVCRTLLAKSVF
SIMKVWRALLQKSVF

SEQ ID NO: 271929 - protein, 15 aa, Artificial Sequence
  Description of Artificial Sequence: Synthetic peptide
  Seed: SIGKVCRTLLAKSVF
SIMKVWRALLRKSVF

SEQ ID NO: 271930 - protein, 15 aa, Artificial Sequence
  Description of Artificial Sequence: Synthetic peptide
  Seed: SIGKVCRTLLAKSVF
SIMKVWRALLSKSVF

SEQ ID NO: 271931 - protein, 15 aa, Artificial Sequence
  Description of Artificial Sequence: Synthetic peptide
  Seed: SIGKVCRTLLAKSVF
SIMKVWRALLTKSVF

SEQ ID NO: 271932 - protein, 15 aa, Artificial Sequence
  Description of Artificial Sequence: Synthetic peptide
  Seed: SIGKVCRTLLAKSVF
SIMKVWRELLRKSVF

SEQ ID NO: 271933 - protein, 15 aa, Artificial Sequence
  Description of Artificial Sequence: Synthetic peptide
  Seed: SIGKVCRTLLAKSVF
SIMKVWRGLLAKSVF

SEQ ID NO: 271934 - protein, 15 aa, Artificial Sequence
  Description of Artificial Sequence: Synthetic peptide
  Seed: SIGKVCRTLLAKSVF
SIMKVWRGLLHKSVF

SEQ ID NO: 271935 - protein, 15 aa, Artificial Sequence
  Description of Artificial Sequence: Synthetic peptide
  Seed: SIGKVCRTLLAKSVF
SIMKVWRGLLQKSVF

SEQ ID NO: 271936 - protein, 15 aa, Artificial Sequence
  Description of Artificial Sequence: Synthetic peptide
  Seed: SIGKVCRTLLAKSVF
SIMKVWRGLLRKSVF

SEQ ID NO: 271937 - protein, 15 aa, Artificial Sequence
  Description of Artificial Sequence: Synthetic peptide
  Seed: SIGKVCRTLLAKSVF
SIMKVWRGLLSKSVF

SEQ ID NO: 271938 - protein, 15 aa, Artificial Sequence
  Description of Artificial Sequence: Synthetic peptide
  Seed: SIGKVCRTLLAKSVF
SIMKVWRHLLAKSVF

SEQ ID NO: 271939 - protein, 15 aa, Artificial Sequence
  Description of Artificial Sequence: Synthetic peptide
  Seed: SIGKVCRTLLAKSVF
SIMKVWRHLLGKSVF

SEQ ID NO: 271940 - protein, 15 aa, Artificial Sequence
  Description of Artificial Sequence: Synthetic peptide
  Seed: SIGKVCRTLLAKSVF
SIMKVWRHLLHKSVF

SEQ ID NO: 271941 - protein, 15 aa, Artificial Sequence
  Description of Artificial Sequence: Synthetic peptide
  Seed: SIGKVCRTLLAKSVF
SIMKVWRHLLIKSVF

SEQ ID NO: 271942 - protein, 15 aa, Artificial Sequence
  Description of Artificial Sequence: Synthetic peptide
  Seed: SIGKVCRTLLAKSVF
SIMKVWRHLLKKSVF

SEQ ID NO: 271943 - protein, 15 aa, Artificial Sequence
  Description of Artificial Sequence: Synthetic peptide
  Seed: SIGKVCRTLLAKSVF
SIMKVWRHLLMKSVF

SEQ ID NO: 271944 - protein, 15 aa, Artificial Sequence
  Description of Artificial Sequence: Synthetic peptide
  Seed: SIGKVCRTLLAKSVF
SIMKVWRHLLNKSVF

SEQ ID NO: 271945 - protein, 15 aa, Artificial Sequence
  Description of Artificial Sequence: Synthetic peptide
  Seed: SIGKVCRTLLAKSVF
SIMKVWRHLLPKSVF

SEQ ID NO: 271946 - protein, 15 aa, Artificial Sequence
  Description of Artificial Sequence: Synthetic peptide
  Seed: SIGKVCRTLLAKSVF
SIMKVWRHLLQKSVF

SEQ ID NO: 271947 - protein, 15 aa, Artificial Sequence
  Description of Artificial Sequence: Synthetic peptide
  Seed: SIGKVCRTLLAKSVF
SIMKVWRHLLRKSVF

SEQ ID NO: 271948 - protein, 15 aa, Artificial Sequence
  Description of Artificial Sequence: Synthetic peptide
  Seed: SIGKVCRTLLAKSVF
SIMKVWRHLLSKSVF

SEQ ID NO: 271949 - protein, 15 aa, Artificial Sequence
  Description of Artificial Sequence: Synthetic peptide
  Seed: SIGKVCRTLLAKSVF
SIMKVWRHLLTKSVF

SEQ ID NO: 271950 - protein, 15 aa, Artificial Sequence
  Description of Artificial Sequence: Synthetic peptide
  Seed: SIGKVCRTLLAKSVF
SIMKVWRHLLVKSVF

SEQ ID NO: 271951 - protein, 15 aa, Artificial Sequence
  Description of Artificial Sequence: Synthetic peptide
  Seed: SIGKVCRTLLAKSVF
SIMKVWRHLLYKSVF

SEQ ID NO: 271952 - protein, 15 aa, Artificial Sequence
  Description of Artificial Sequence: Synthetic peptide
  Seed: SIGKVCRTLLAKSVF
SIMKVWRILLHKSVF

SEQ ID NO: 271953 - protein, 15 aa, Artificial Sequence
  Description of Artificial Sequence: Synthetic peptide
  Seed: SIGKVCRTLLAKSVF
SIMKVWRKLLAKSVF

SEQ ID NO: 271954 - protein, 15 aa, Artificial Sequence
  Description of Artificial Sequence: Synthetic peptide
  Seed: SIGKVCRTLLAKSVF
SIMKVWRKLLCKSVF

SEQ ID NO: 271955 - protein, 15 aa, Artificial Sequence
  Description of Artificial Sequence: Synthetic peptide
  Seed: SIGKVCRTLLAKSVF
SIMKVWRKLLDKSVF

SEQ ID NO: 271956 - protein, 15 aa, Artificial Sequence
  Description of Artificial Sequence: Synthetic peptide
  Seed: SIGKVCRTLLAKSVF
SIMKVWRKLLEKSVF

SEQ ID NO: 271957 - protein, 15 aa, Artificial Sequence
  Description of Artificial Sequence: Synthetic peptide
  Seed: SIGKVCRTLLAKSVF
SIMKVWRKLLFKSVF

SEQ ID NO: 271958 - protein, 15 aa, Artificial Sequence
  Description of Artificial Sequence: Synthetic peptide
  Seed: SIGKVCRTLLAKSVF
SIMKVWRKLLGKSVF

SEQ ID NO: 271959 - protein, 15 aa, Artificial Sequence
  Description of Artificial Sequence: Synthetic peptide
  Seed: SIGKVCRTLLAKSVF
SIMKVWRKLLHKSVF

SEQ ID NO: 271960 - protein, 15 aa, Artificial Sequence
  Description of Artificial Sequence: Synthetic peptide
  Seed: SIGKVCRTLLAKSVF
SIMKVWRKLLIKSVF

SEQ ID NO: 271961 - protein, 15 aa, Artificial Sequence
  Description of Artificial Sequence: Synthetic peptide
  Seed: SIGKVCRTLLAKSVF
SIMKVWRKLLKKSVF

SEQ ID NO: 271962 - protein, 15 aa, Artificial Sequence
  Description of Artificial Sequence: Synthetic peptide
  Seed: SIGKVCRTLLAKSVF
SIMKVWRKLLLKSVF

SEQ ID NO: 271963 - protein, 15 aa, Artificial Sequence
  Description of Artificial Sequence: Synthetic peptide
  Seed: SIGKVCRTLLAKSVF
SIMKVWRKLLMKSVF

SEQ ID NO: 271964 - protein, 15 aa, Artificial Sequence
  Description of Artificial Sequence: Synthetic peptide
  Seed: SIGKVCRTLLAKSVF
SIMKVWRKLLNKSVF

SEQ ID NO: 271965 - protein, 15 aa, Artificial Sequence
  Description of Artificial Sequence: Synthetic peptide
  Seed: SIGKVCRTLLAKSVF
SIMKVWRKLLPKSVF

SEQ ID NO: 271966 - protein, 15 aa, Artificial Sequence
  Description of Artificial Sequence: Synthetic peptide
  Seed: SIGKVCRTLLAKSVF
SIMKVWRKLLQKSVF

SEQ ID NO: 271967 - protein, 15 aa, Artificial Sequence
  Description of Artificial Sequence: Synthetic peptide
  Seed: SIGKVCRTLLAKSVF
SIMKVWRKLLRKSVF

SEQ ID NO: 271968 - protein, 15 aa, Artificial Sequence
  Description of Artificial Sequence: Synthetic peptide
  Seed: SIGKVCRTLLAKSVF
SIMKVWRKLLSKSVF

SEQ ID NO: 271969 - protein, 15 aa, Artificial Sequence
  Description of Artificial Sequence: Synthetic peptide
  Seed: SIGKVCRTLLAKSVF
SIMKVWRKLLTKSVF

SEQ ID NO: 271970 - protein, 15 aa, Artificial Sequence
  Description of Artificial Sequence: Synthetic peptide
  Seed: SIGKVCRTLLAKSVF
SIMKVWRKLLVKSVF

SEQ ID NO: 271971 - protein, 15 aa, Artificial Sequence
  Description of Artificial Sequence: Synthetic peptide
  Seed: SIGKVCRTLLAKSVF
SIMKVWRKLLWKSVF

SEQ ID NO: 271972 - protein, 15 aa, Artificial Sequence
  Description of Artificial Sequence: Synthetic peptide
  Seed: SIGKVCRTLLAKSVF
SIMKVWRKLLYKSVF

SEQ ID NO: 271973 - protein, 15 aa, Artificial Sequence
  Description of Artificial Sequence: Synthetic peptide
  Seed: SIGKVCRTLLAKSVF
SIMKVWRNLLAKSVF

SEQ ID NO: 271974 - protein, 15 aa, Artificial Sequence
  Description of Artificial Sequence: Synthetic peptide
  Seed: SIGKVCRTLLAKSVF
SIMKVWRNLLGKSVF

SEQ ID NO: 271975 - protein, 15 aa, Artificial Sequence
  Description of Artificial Sequence: Synthetic peptide
  Seed: SIGKVCRTLLAKSVF
SIMKVWRNLLHKSVF

SEQ ID NO: 271976 - protein, 15 aa, Artificial Sequence
  Description of Artificial Sequence: Synthetic peptide
  Seed: SIGKVCRTLLAKSVF
SIMKVWRNLLKKSVF

SEQ ID NO: 271977 - protein, 15 aa, Artificial Sequence
  Description of Artificial Sequence: Synthetic peptide
  Seed: SIGKVCRTLLAKSVF
SIMKVWRNLLQKSVF

SEQ ID NO: 271978 - protein, 15 aa, Artificial Sequence
  Description of Artificial Sequence: Synthetic peptide
  Seed: SIGKVCRTLLAKSVF
SIMKVWRNLLRKSVF

SEQ ID NO: 271979 - protein, 15 aa, Artificial Sequence
  Description of Artificial Sequence: Synthetic peptide
  Seed: SIGKVCRTLLAKSVF
SIMKVWRNLLSKSVF

SEQ ID NO: 271980 - protein, 15 aa, Artificial Sequence
  Description of Artificial Sequence: Synthetic peptide
  Seed: SIGKVCRTLLAKSVF
SIMKVWRPLLAKSVF

SEQ ID NO: 271981 - protein, 15 aa, Artificial Sequence
  Description of Artificial Sequence: Synthetic peptide
  Seed: SIGKVCRTLLAKSVF
SIMKVWRPLLGKSVF

SEQ ID NO: 271982 - protein, 15 aa, Artificial Sequence
  Description of Artificial Sequence: Synthetic peptide
  Seed: SIGKVCRTLLAKSVF
SIMKVWRPLLHKSVF

SEQ ID NO: 271983 - protein, 15 aa, Artificial Sequence
  Description of Artificial Sequence: Synthetic peptide
  Seed: SIGKVCRTLLAKSVF
SIMKVWRPLLQKSVF

SEQ ID NO: 271984 - protein, 15 aa, Artificial Sequence
  Description of Artificial Sequence: Synthetic peptide
  Seed: SIGKVCRTLLAKSVF
SIMKVWRPLLRKSVF

SEQ ID NO: 271985 - protein, 15 aa, Artificial Sequence
  Description of Artificial Sequence: Synthetic peptide
  Seed: SIGKVCRTLLAKSVF
SIMKVWRPLLSKSVF

SEQ ID NO: 271986 - protein, 15 aa, Artificial Sequence
  Description of Artificial Sequence: Synthetic peptide
  Seed: SIGKVCRTLLAKSVF
SIMKVWRPLLTKSVF

SEQ ID NO: 271987 - protein, 15 aa, Artificial Sequence
  Description of Artificial Sequence: Synthetic peptide
  Seed: SIGKVCRTLLAKSVF
SIMKVWRPLLVKSVF

SEQ ID NO: 271988 - protein, 15 aa, Artificial Sequence
  Description of Artificial Sequence: Synthetic peptide
  Seed: SIGKVCRTLLAKSVF
SIMKVWRQLLAKSVF

SEQ ID NO: 271989 - protein, 15 aa, Artificial Sequence
  Description of Artificial Sequence: Synthetic peptide
  Seed: SIGKVCRTLLAKSVF
SIMKVWRQLLRKSVF

SEQ ID NO: 271990 - protein, 15 aa, Artificial Sequence
  Description of Artificial Sequence: Synthetic peptide
  Seed: SIGKVCRTLLAKSVF
SIMKVWRQLLSKSVF

SEQ ID NO: 271991 - protein, 15 aa, Artificial Sequence
  Description of Artificial Sequence: Synthetic peptide
  Seed: SIGKVCRTLLAKSVF
SIMKVWRRLLAKSVF

SEQ ID NO: 271992 - protein, 15 aa, Artificial Sequence
  Description of Artificial Sequence: Synthetic peptide
  Seed: SIGKVCRTLLAKSVF
SIMKVWRRLLCKSVF

SEQ ID NO: 271993 - protein, 15 aa, Artificial Sequence
  Description of Artificial Sequence: Synthetic peptide
  Seed: SIGKVCRTLLAKSVF
SIMKVWRRLLDKSVF

SEQ ID NO: 271994 - protein, 15 aa, Artificial Sequence
  Description of Artificial Sequence: Synthetic peptide
  Seed: SIGKVCRTLLAKSVF
SIMKVWRRLLEKSVF

SEQ ID NO: 271995 - protein, 15 aa, Artificial Sequence
  Description of Artificial Sequence: Synthetic peptide
  Seed: SIGKVCRTLLAKSVF
SIMKVWRRLLFKSVF

SEQ ID NO: 271996 - protein, 15 aa, Artificial Sequence
  Description of Artificial Sequence: Synthetic peptide
  Seed: SIGKVCRTLLAKSVF
SIMKVWRRLLGKSVF

SEQ ID NO: 271997 - protein, 15 aa, Artificial Sequence
  Description of Artificial Sequence: Synthetic peptide
  Seed: SIGKVCRTLLAKSVF
SIMKVWRRLLHKSVF

SEQ ID NO: 271998 - protein, 15 aa, Artificial Sequence
  Description of Artificial Sequence: Synthetic peptide
  Seed: SIGKVCRTLLAKSVF
SIMKVWRRLLIKSVF

SEQ ID NO: 271999 - protein, 15 aa, Artificial Sequence
  Description of Artificial Sequence: Synthetic peptide
  Seed: SIGKVCRTLLAKSVF
SIMKVWRRLLKKSVF

SEQ ID NO: 272000 - protein, 15 aa, Artificial Sequence
  Description of Artificial Sequence: Synthetic peptide
  Seed: SIGKVCRTLLAKSVF
SIMKVWRRLLLKSVF

SEQ ID NO: 272001 - protein, 15 aa, Artificial Sequence
  Description of Artificial Sequence: Synthetic peptide
  Seed: SIGKVCRTLLAKSVF
SIMKVWRRLLMKSVF

SEQ ID NO: 272002 - protein, 15 aa, Artificial Sequence
  Description of Artificial Sequence: Synthetic peptide
  Seed: SIGKVCRTLLAKSVF
SIMKVWRRLLNKSVF

SEQ ID NO: 272003 - protein, 15 aa, Artificial Sequence
  Description of Artificial Sequence: Synthetic peptide
  Seed: SIGKVCRTLLAKSVF
SIMKVWRRLLPKSVF

SEQ ID NO: 272004 - protein, 15 aa, Artificial Sequence
  Description of Artificial Sequence: Synthetic peptide
  Seed: SIGKVCRTLLAKSVF
SIMKVWRRLLQKSVF

SEQ ID NO: 272005 - protein, 15 aa, Artificial Sequence
  Description of Artificial Sequence: Synthetic peptide
  Seed: SIGKVCRTLLAKSVF
SIMKVWRRLLRKSVF

SEQ ID NO: 272006 - protein, 15 aa, Artificial Sequence
  Description of Artificial Sequence: Synthetic peptide
  Seed: SIGKVCRTLLAKSVF
SIMKVWRRLLSKSVF

SEQ ID NO: 272007 - protein, 15 aa, Artificial Sequence
  Description of Artificial Sequence: Synthetic peptide
  Seed: SIGKVCRTLLAKSVF
SIMKVWRRLLTKSVF

SEQ ID NO: 272008 - protein, 15 aa, Artificial Sequence
  Description of Artificial Sequence: Synthetic peptide
  Seed: SIGKVCRTLLAKSVF
SIMKVWRRLLVKSVF

SEQ ID NO: 272009 - protein, 15 aa, Artificial Sequence
  Description of Artificial Sequence: Synthetic peptide
  Seed: SIGKVCRTLLAKSVF
SIMKVWRRLLWKSVF

SEQ ID NO: 272010 - protein, 15 aa, Artificial Sequence
  Description of Artificial Sequence: Synthetic peptide
  Seed: SIGKVCRTLLAKSVF
SIMKVWRRLLYKSVF

SEQ ID NO: 272011 - protein, 15 aa, Artificial Sequence
  Description of Artificial Sequence: Synthetic peptide
  Seed: SIGKVCRTLLAKSVF
SIMKVWRSLLAKSVF

SEQ ID NO: 272012 - protein, 15 aa, Artificial Sequence
  Description of Artificial Sequence: Synthetic peptide
  Seed: SIGKVCRTLLAKSVF
SIMKVWRSLLGKSVF

SEQ ID NO: 272013 - protein, 15 aa, Artificial Sequence
  Description of Artificial Sequence: Synthetic peptide
  Seed: SIGKVCRTLLAKSVF
SIMKVWRSLLHKSVF

SEQ ID NO: 272014 - protein, 15 aa, Artificial Sequence
  Description of Artificial Sequence: Synthetic peptide
  Seed: SIGKVCRTLLAKSVF
SIMKVWRSLLQKSVF

SEQ ID NO: 272015 - protein, 15 aa, Artificial Sequence
  Description of Artificial Sequence: Synthetic peptide
  Seed: SIGKVCRTLLAKSVF
SIMKVWRSLLRKSVF

SEQ ID NO: 272016 - protein, 15 aa, Artificial Sequence
  Description of Artificial Sequence: Synthetic peptide
  Seed: SIGKVCRTLLAKSVF
SIMKVWRSLLSKSVF

SEQ ID NO: 272017 - protein, 15 aa, Artificial Sequence
  Description of Artificial Sequence: Synthetic peptide
  Seed: SIGKVCRTLLAKSVF
SIMKVWRTLLAKSVF

SEQ ID NO: 272018 - protein, 15 aa, Artificial Sequence
  Description of Artificial Sequence: Synthetic peptide
  Seed: SIGKVCRTLLAKSVF
SIMKVWRTLLGKSVF

SEQ ID NO: 272019 - protein, 15 aa, Artificial Sequence
  Description of Artificial Sequence: Synthetic peptide
  Seed: SIGKVCRTLLAKSVF
SIMKVWRTLLHKSVF

SEQ ID NO: 272020 - protein, 15 aa, Artificial Sequence
  Description of Artificial Sequence: Synthetic peptide
  Seed: SIGKVCRTLLAKSVF
SIMKVWRTLLKKSVF

SEQ ID NO: 272021 - protein, 15 aa, Artificial Sequence
  Description of Artificial Sequence: Synthetic peptide
  Seed: SIGKVCRTLLAKSVF
SIMKVWRTLLQKSVF

SEQ ID NO: 272022 - protein, 15 aa, Artificial Sequence
  Description of Artificial Sequence: Synthetic peptide
  Seed: SIGKVCRTLLAKSVF
SIMKVWRTLLRKSVF

SEQ ID NO: 272023 - protein, 15 aa, Artificial Sequence
  Description of Artificial Sequence: Synthetic peptide
  Seed: SIGKVCRTLLAKSVF
SIMKVWRTLLSKSVF

SEQ ID NO: 272024 - protein, 15 aa, Artificial Sequence
  Description of Artificial Sequence: Synthetic peptide
  Seed: SIGKVCRTLLAKSVF
SIMKVWRVLLHKSVF

SEQ ID NO: 272025 - protein, 15 aa, Artificial Sequence
  Description of Artificial Sequence: Synthetic peptide
  Seed: SIGKVCRTLLAKSVF
SIMKVYRALLAKSVF

SEQ ID NO: 272026 - protein, 15 aa, Artificial Sequence
  Description of Artificial Sequence: Synthetic peptide
  Seed: SIGKVCRTLLAKSVF
SIMKVYRALLGKSVF

SEQ ID NO: 272027 - protein, 15 aa, Artificial Sequence
  Description of Artificial Sequence: Synthetic peptide
  Seed: SIGKVCRTLLAKSVF
SIMKVYRALLHKSVF

SEQ ID NO: 272028 - protein, 15 aa, Artificial Sequence
  Description of Artificial Sequence: Synthetic peptide
  Seed: SIGKVCRTLLAKSVF
SIMKVYRALLQKSVF

SEQ ID NO: 272029 - protein, 15 aa, Artificial Sequence
  Description of Artificial Sequence: Synthetic peptide
  Seed: SIGKVCRTLLAKSVF
SIMKVYRALLRKSVF

SEQ ID NO: 272030 - protein, 15 aa, Artificial Sequence
  Description of Artificial Sequence: Synthetic peptide
  Seed: SIGKVCRTLLAKSVF
SIMKVYRALLSKSVF

SEQ ID NO: 272031 - protein, 15 aa, Artificial Sequence
  Description of Artificial Sequence: Synthetic peptide
  Seed: SIGKVCRTLLAKSVF
SIMKVYRGLLAKSVF

SEQ ID NO: 272032 - protein, 15 aa, Artificial Sequence
  Description of Artificial Sequence: Synthetic peptide
  Seed: SIGKVCRTLLAKSVF
SIMKVYRGLLHKSVF

SEQ ID NO: 272033 - protein, 15 aa, Artificial Sequence
  Description of Artificial Sequence: Synthetic peptide
  Seed: SIGKVCRTLLAKSVF
SIMKVYRGLLSKSVF

SEQ ID NO: 272034 - protein, 15 aa, Artificial Sequence
  Description of Artificial Sequence: Synthetic peptide
  Seed: SIGKVCRTLLAKSVF
SIMKVYRHLLAKSVF

SEQ ID NO: 272035 - protein, 15 aa, Artificial Sequence
  Description of Artificial Sequence: Synthetic peptide
  Seed: SIGKVCRTLLAKSVF
SIMKVYRHLLGKSVF

SEQ ID NO: 272036 - protein, 15 aa, Artificial Sequence
  Description of Artificial Sequence: Synthetic peptide
  Seed: SIGKVCRTLLAKSVF
SIMKVYRHLLHKSVF

SEQ ID NO: 272037 - protein, 15 aa, Artificial Sequence
  Description of Artificial Sequence: Synthetic peptide
  Seed: SIGKVCRTLLAKSVF
SIMKVYRHLLNKSVF

SEQ ID NO: 272038 - protein, 15 aa, Artificial Sequence
  Description of Artificial Sequence: Synthetic peptide
  Seed: SIGKVCRTLLAKSVF
SIMKVYRHLLQKSVF

SEQ ID NO: 272039 - protein, 15 aa, Artificial Sequence
  Description of Artificial Sequence: Synthetic peptide
  Seed: SIGKVCRTLLAKSVF
SIMKVYRHLLRKSVF

SEQ ID NO: 272040 - protein, 15 aa, Artificial Sequence
  Description of Artificial Sequence: Synthetic peptide
  Seed: SIGKVCRTLLAKSVF
SIMKVYRHLLSKSVF

SEQ ID NO: 272041 - protein, 15 aa, Artificial Sequence
  Description of Artificial Sequence: Synthetic peptide
  Seed: SIGKVCRTLLAKSVF
SIMKVYRHLLTKSVF

SEQ ID NO: 272042 - protein, 15 aa, Artificial Sequence
  Description of Artificial Sequence: Synthetic peptide
  Seed: SIGKVCRTLLAKSVF
SIMKVYRHLLVKSVF

SEQ ID NO: 272043 - protein, 15 aa, Artificial Sequence
  Description of Artificial Sequence: Synthetic peptide
  Seed: SIGKVCRTLLAKSVF
SIMKVYRHLLYKSVF

SEQ ID NO: 272044 - protein, 15 aa, Artificial Sequence
  Description of Artificial Sequence: Synthetic peptide
  Seed: SIGKVCRTLLAKSVF
SIMKVYRKLLAKSVF

SEQ ID NO: 272045 - protein, 15 aa, Artificial Sequence
  Description of Artificial Sequence: Synthetic peptide
  Seed: SIGKVCRTLLAKSVF
SIMKVYRKLLDKSVF

SEQ ID NO: 272046 - protein, 15 aa, Artificial Sequence
  Description of Artificial Sequence: Synthetic peptide
  Seed: SIGKVCRTLLAKSVF
SIMKVYRKLLEKSVF

SEQ ID NO: 272047 - protein, 15 aa, Artificial Sequence
  Description of Artificial Sequence: Synthetic peptide
  Seed: SIGKVCRTLLAKSVF
SIMKVYRKLLFKSVF

SEQ ID NO: 272048 - protein, 15 aa, Artificial Sequence
  Description of Artificial Sequence: Synthetic peptide
  Seed: SIGKVCRTLLAKSVF
SIMKVYRKLLGKSVF

SEQ ID NO: 272049 - protein, 15 aa, Artificial Sequence
  Description of Artificial Sequence: Synthetic peptide
  Seed: SIGKVCRTLLAKSVF
SIMKVYRKLLHKSVF

SEQ ID NO: 272050 - protein, 15 aa, Artificial Sequence
  Description of Artificial Sequence: Synthetic peptide
  Seed: SIGKVCRTLLAKSVF
SIMKVYRKLLIKSVF

SEQ ID NO: 272051 - protein, 15 aa, Artificial Sequence
  Description of Artificial Sequence: Synthetic peptide
  Seed: SIGKVCRTLLAKSVF
SIMKVYRKLLKKSVF

SEQ ID NO: 272052 - protein, 15 aa, Artificial Sequence
  Description of Artificial Sequence: Synthetic peptide
  Seed: SIGKVCRTLLAKSVF
SIMKVYRKLLLKSVF

SEQ ID NO: 272053 - protein, 15 aa, Artificial Sequence
  Description of Artificial Sequence: Synthetic peptide
  Seed: SIGKVCRTLLAKSVF
SIMKVYRKLLMKSVF

SEQ ID NO: 272054 - protein, 15 aa, Artificial Sequence
  Description of Artificial Sequence: Synthetic peptide
  Seed: SIGKVCRTLLAKSVF
SIMKVYRKLLNKSVF

SEQ ID NO: 272055 - protein, 15 aa, Artificial Sequence
  Description of Artificial Sequence: Synthetic peptide
  Seed: SIGKVCRTLLAKSVF
SIMKVYRKLLPKSVF

SEQ ID NO: 272056 - protein, 15 aa, Artificial Sequence
  Description of Artificial Sequence: Synthetic peptide
  Seed: SIGKVCRTLLAKSVF
SIMKVYRKLLQKSVF

SEQ ID NO: 272057 - protein, 15 aa, Artificial Sequence
  Description of Artificial Sequence: Synthetic peptide
  Seed: SIGKVCRTLLAKSVF
SIMKVYRKLLRKSVF

SEQ ID NO: 272058 - protein, 15 aa, Artificial Sequence
  Description of Artificial Sequence: Synthetic peptide
  Seed: SIGKVCRTLLAKSVF
SIMKVYRKLLSKSVF

SEQ ID NO: 272059 - protein, 15 aa, Artificial Sequence
  Description of Artificial Sequence: Synthetic peptide
  Seed: SIGKVCRTLLAKSVF
SIMKVYRKLLTKSVF

SEQ ID NO: 272060 - protein, 15 aa, Artificial Sequence
  Description of Artificial Sequence: Synthetic peptide
  Seed: SIGKVCRTLLAKSVF
SIMKVYRKLLVKSVF

SEQ ID NO: 272061 - protein, 15 aa, Artificial Sequence
  Description of Artificial Sequence: Synthetic peptide
  Seed: SIGKVCRTLLAKSVF
SIMKVYRKLLWKSVF

SEQ ID NO: 272062 - protein, 15 aa, Artificial Sequence
  Description of Artificial Sequence: Synthetic peptide
  Seed: SIGKVCRTLLAKSVF
SIMKVYRKLLYKSVF

SEQ ID NO: 272063 - protein, 15 aa, Artificial Sequence
  Description of Artificial Sequence: Synthetic peptide
  Seed: SIGKVCRTLLAKSVF
SIMKVYRNLLAKSVF

SEQ ID NO: 272064 - protein, 15 aa, Artificial Sequence
  Description of Artificial Sequence: Synthetic peptide
  Seed: SIGKVCRTLLAKSVF
SIMKVYRNLLHKSVF

SEQ ID NO: 272065 - protein, 15 aa, Artificial Sequence
  Description of Artificial Sequence: Synthetic peptide
  Seed: SIGKVCRTLLAKSVF
SIMKVYRNLLSKSVF

SEQ ID NO: 272066 - protein, 15 aa, Artificial Sequence
  Description of Artificial Sequence: Synthetic peptide
  Seed: SIGKVCRTLLAKSVF
SIMKVYRPLLAKSVF

SEQ ID NO: 272067 - protein, 15 aa, Artificial Sequence
  Description of Artificial Sequence: Synthetic peptide
  Seed: SIGKVCRTLLAKSVF
SIMKVYRPLLHKSVF

SEQ ID NO: 272068 - protein, 15 aa, Artificial Sequence
  Description of Artificial Sequence: Synthetic peptide
  Seed: SIGKVCRTLLAKSVF
SIMKVYRPLLSKSVF

SEQ ID NO: 272069 - protein, 15 aa, Artificial Sequence
  Description of Artificial Sequence: Synthetic peptide
  Seed: SIGKVCRTLLAKSVF
SIMKVYRQLLRKSVF

SEQ ID NO: 272070 - protein, 15 aa, Artificial Sequence
  Description of Artificial Sequence: Synthetic peptide
  Seed: SIGKVCRTLLAKSVF
SIMKVYRRLLAKSVF

SEQ ID NO: 272071 - protein, 15 aa, Artificial Sequence
  Description of Artificial Sequence: Synthetic peptide
  Seed: SIGKVCRTLLAKSVF
SIMKVYRRLLCKSVF

SEQ ID NO: 272072 - protein, 15 aa, Artificial Sequence
  Description of Artificial Sequence: Synthetic peptide
  Seed: SIGKVCRTLLAKSVF
SIMKVYRRLLDKSVF

SEQ ID NO: 272073 - protein, 15 aa, Artificial Sequence
  Description of Artificial Sequence: Synthetic peptide
  Seed: SIGKVCRTLLAKSVF
SIMKVYRRLLEKSVF

SEQ ID NO: 272074 - protein, 15 aa, Artificial Sequence
  Description of Artificial Sequence: Synthetic peptide
  Seed: SIGKVCRTLLAKSVF
SIMKVYRRLLFKSVF

SEQ ID NO: 272075 - protein, 15 aa, Artificial Sequence
  Description of Artificial Sequence: Synthetic peptide
  Seed: SIGKVCRTLLAKSVF
SIMKVYRRLLGKSVF

SEQ ID NO: 272076 - protein, 15 aa, Artificial Sequence
  Description of Artificial Sequence: Synthetic peptide
  Seed: SIGKVCRTLLAKSVF
SIMKVYRRLLHKSVF

SEQ ID NO: 272077 - protein, 15 aa, Artificial Sequence
  Description of Artificial Sequence: Synthetic peptide
  Seed: SIGKVCRTLLAKSVF
SIMKVYRRLLIKSVF

SEQ ID NO: 272078 - protein, 15 aa, Artificial Sequence
  Description of Artificial Sequence: Synthetic peptide
  Seed: SIGKVCRTLLAKSVF
SIMKVYRRLLKKSVF

SEQ ID NO: 272079 - protein, 15 aa, Artificial Sequence
  Description of Artificial Sequence: Synthetic peptide
  Seed: SIGKVCRTLLAKSVF
SIMKVYRRLLLKSVF

SEQ ID NO: 272080 - protein, 15 aa, Artificial Sequence
  Description of Artificial Sequence: Synthetic peptide
  Seed: SIGKVCRTLLAKSVF
SIMKVYRRLLMKSVF

SEQ ID NO: 272081 - protein, 15 aa, Artificial Sequence
  Description of Artificial Sequence: Synthetic peptide
  Seed: SIGKVCRTLLAKSVF
SIMKVYRRLLNKSVF

SEQ ID NO: 272082 - protein, 15 aa, Artificial Sequence
  Description of Artificial Sequence: Synthetic peptide
  Seed: SIGKVCRTLLAKSVF
SIMKVYRRLLPKSVF

SEQ ID NO: 272083 - protein, 15 aa, Artificial Sequence
  Description of Artificial Sequence: Synthetic peptide
  Seed: SIGKVCRTLLAKSVF
SIMKVYRRLLQKSVF

SEQ ID NO: 272084 - protein, 15 aa, Artificial Sequence
  Description of Artificial Sequence: Synthetic peptide
  Seed: SIGKVCRTLLAKSVF
SIMKVYRRLLRKSVF

SEQ ID NO: 272085 - protein, 15 aa, Artificial Sequence
  Description of Artificial Sequence: Synthetic peptide
  Seed: SIGKVCRTLLAKSVF
SIMKVYRRLLSKSVF

SEQ ID NO: 272086 - protein, 15 aa, Artificial Sequence
  Description of Artificial Sequence: Synthetic peptide
  Seed: SIGKVCRTLLAKSVF
SIMKVYRRLLTKSVF

SEQ ID NO: 272087 - protein, 15 aa, Artificial Sequence
  Description of Artificial Sequence: Synthetic peptide
  Seed: SIGKVCRTLLAKSVF
SIMKVYRRLLVKSVF

SEQ ID NO: 272088 - protein, 15 aa, Artificial Sequence
  Description of Artificial Sequence: Synthetic peptide
  Seed: SIGKVCRTLLAKSVF
SIMKVYRRLLWKSVF

SEQ ID NO: 272089 - protein, 15 aa, Artificial Sequence
  Description of Artificial Sequence: Synthetic peptide
  Seed: SIGKVCRTLLAKSVF
SIMKVYRRLLYKSVF

SEQ ID NO: 272090 - protein, 15 aa, Artificial Sequence
  Description of Artificial Sequence: Synthetic peptide
  Seed: SIGKVCRTLLAKSVF
SIMKVYRSLLAKSVF

SEQ ID NO: 272091 - protein, 15 aa, Artificial Sequence
  Description of Artificial Sequence: Synthetic peptide
  Seed: SIGKVCRTLLAKSVF
SIMKVYRSLLHKSVF

SEQ ID NO: 272092 - protein, 15 aa, Artificial Sequence
  Description of Artificial Sequence: Synthetic peptide
  Seed: SIGKVCRTLLAKSVF
SIMKVYRSLLSKSVF

SEQ ID NO: 272093 - protein, 15 aa, Artificial Sequence
  Description of Artificial Sequence: Synthetic peptide
  Seed: SIGKVCRTLLAKSVF
SIMKVYRTLLAKSVF

SEQ ID NO: 272094 - protein, 15 aa, Artificial Sequence
  Description of Artificial Sequence: Synthetic peptide
  Seed: SIGKVCRTLLAKSVF
SIMKVYRTLLHKSVF

SEQ ID NO: 272095 - protein, 15 aa, Artificial Sequence
  Description of Artificial Sequence: Synthetic peptide
  Seed: SIGKVCRTLLAKSVF
SIMKVYRTLLQKSVF

SEQ ID NO: 272096 - protein, 15 aa, Artificial Sequence
  Description of Artificial Sequence: Synthetic peptide
  Seed: SIGKVCRTLLAKSVF
SIMKVYRTLLRKSVF

SEQ ID NO: 272097 - protein, 15 aa, Artificial Sequence
  Description of Artificial Sequence: Synthetic peptide
  Seed: SIGKVCRTLLAKSVF
SIMKVYRTLLSKSVF

SEQ ID NO: 272098 - protein, 15 aa, Artificial Sequence
  Description of Artificial Sequence: Synthetic peptide
  Seed: SIGKVCRTLLAKSVF
SIMKVYRVLLHKSVF

SEQ ID NO: 272099 - protein, 15 aa, Artificial Sequence
  Description of Artificial Sequence: Synthetic peptide
  Seed: SIGKVCRTLLAKSVF
SINKVARKLLGKSVF

SEQ ID NO: 272100 - protein, 15 aa, Artificial Sequence
  Description of Artificial Sequence: Synthetic peptide
  Seed: SIGKVCRTLLAKSVF
SINKVARRLLGKSVF

SEQ ID NO: 272101 - protein, 15 aa, Artificial Sequence
  Description of Artificial Sequence: Synthetic peptide
  Seed: SIGKVCRTLLAKSVF
SINKVCRKLLAKSVF

SEQ ID NO: 272102 - protein, 15 aa, Artificial Sequence
  Description of Artificial Sequence: Synthetic peptide
  Seed: SIGKVCRTLLAKSVF
SINKVCRKLLSKSVF

SEQ ID NO: 272103 - protein, 15 aa, Artificial Sequence
  Description of Artificial Sequence: Synthetic peptide
  Seed: SIGKVCRTLLAKSVF
SINKVCRRLLAKSVF

SEQ ID NO: 272104 - protein, 15 aa, Artificial Sequence
  Description of Artificial Sequence: Synthetic peptide
  Seed: SIGKVCRTLLAKSVF
SINKVCRRLLGKSVF

SEQ ID NO: 272105 - protein, 15 aa, Artificial Sequence
  Description of Artificial Sequence: Synthetic peptide
  Seed: SIGKVCRTLLAKSVF
SINKVCRRLLMKSVF

SEQ ID NO: 272106 - protein, 15 aa, Artificial Sequence
  Description of Artificial Sequence: Synthetic peptide
  Seed: SIGKVCRTLLAKSVF
SINKVCRRLLQKSVF

SEQ ID NO: 272107 - protein, 15 aa, Artificial Sequence
  Description of Artificial Sequence: Synthetic peptide
  Seed: SIGKVCRTLLAKSVF
SINKVCRRLLSKSVF

SEQ ID NO: 272108 - protein, 15 aa, Artificial Sequence
  Description of Artificial Sequence: Synthetic peptide
  Seed: SIGKVCRTLLAKSVF
SINKVCRRLLVKSVF

SEQ ID NO: 272109 - protein, 15 aa, Artificial Sequence
  Description of Artificial Sequence: Synthetic peptide
  Seed: SIGKVCRTLLAKSVF
SINKVFRKLLAKSVF

SEQ ID NO: 272110 - protein, 15 aa, Artificial Sequence
  Description of Artificial Sequence: Synthetic peptide
  Seed: SIGKVCRTLLAKSVF
SINKVFRKLLGKSVF

SEQ ID NO: 272111 - protein, 15 aa, Artificial Sequence
  Description of Artificial Sequence: Synthetic peptide
  Seed: SIGKVCRTLLAKSVF
SINKVFRKLLQKSVF

SEQ ID NO: 272112 - protein, 15 aa, Artificial Sequence
  Description of Artificial Sequence: Synthetic peptide
  Seed: SIGKVCRTLLAKSVF
SINKVFRKLLSKSVF

SEQ ID NO: 272113 - protein, 15 aa, Artificial Sequence
  Description of Artificial Sequence: Synthetic peptide
  Seed: SIGKVCRTLLAKSVF
SINKVFRRLLAKSVF

SEQ ID NO: 272114 - protein, 15 aa, Artificial Sequence
  Description of Artificial Sequence: Synthetic peptide
  Seed: SIGKVCRTLLAKSVF
SINKVFRRLLGKSVF

SEQ ID NO: 272115 - protein, 15 aa, Artificial Sequence
  Description of Artificial Sequence: Synthetic peptide
  Seed: SIGKVCRTLLAKSVF
SINKVFRRLLQKSVF

SEQ ID NO: 272116 - protein, 15 aa, Artificial Sequence
  Description of Artificial Sequence: Synthetic peptide
  Seed: SIGKVCRTLLAKSVF
SINKVFRRLLSKSVF

SEQ ID NO: 272117 - protein, 15 aa, Artificial Sequence
  Description of Artificial Sequence: Synthetic peptide
  Seed: SIGKVCRTLLAKSVF
SINKVIRKLLAKSVF

SEQ ID NO: 272118 - protein, 15 aa, Artificial Sequence
  Description of Artificial Sequence: Synthetic peptide
  Seed: SIGKVCRTLLAKSVF
SINKVIRKLLGKSVF

SEQ ID NO: 272119 - protein, 15 aa, Artificial Sequence
  Description of Artificial Sequence: Synthetic peptide
  Seed: SIGKVCRTLLAKSVF
SINKVIRKLLLKSVF

SEQ ID NO: 272120 - protein, 15 aa, Artificial Sequence
  Description of Artificial Sequence: Synthetic peptide
  Seed: SIGKVCRTLLAKSVF
SINKVIRKLLMKSVF

SEQ ID NO: 272121 - protein, 15 aa, Artificial Sequence
  Description of Artificial Sequence: Synthetic peptide
  Seed: SIGKVCRTLLAKSVF
SINKVIRKLLQKSVF

SEQ ID NO: 272122 - protein, 15 aa, Artificial Sequence
  Description of Artificial Sequence: Synthetic peptide
  Seed: SIGKVCRTLLAKSVF
SINKVIRKLLSKSVF

SEQ ID NO: 272123 - protein, 15 aa, Artificial Sequence
  Description of Artificial Sequence: Synthetic peptide
  Seed: SIGKVCRTLLAKSVF
SINKVIRKLLVKSVF

SEQ ID NO: 272124 - protein, 15 aa, Artificial Sequence
  Description of Artificial Sequence: Synthetic peptide
  Seed: SIGKVCRTLLAKSVF
SINKVIRRLLAKSVF

SEQ ID NO: 272125 - protein, 15 aa, Artificial Sequence
  Description of Artificial Sequence: Synthetic peptide
  Seed: SIGKVCRTLLAKSVF
SINKVIRRLLCKSVF

SEQ ID NO: 272126 - protein, 15 aa, Artificial Sequence
  Description of Artificial Sequence: Synthetic peptide
  Seed: SIGKVCRTLLAKSVF
SINKVIRRLLGKSVF

SEQ ID NO: 272127 - protein, 15 aa, Artificial Sequence
  Description of Artificial Sequence: Synthetic peptide
  Seed: SIGKVCRTLLAKSVF
SINKVIRRLLMKSVF

SEQ ID NO: 272128 - protein, 15 aa, Artificial Sequence
  Description of Artificial Sequence: Synthetic peptide
  Seed: SIGKVCRTLLAKSVF
SINKVIRRLLQKSVF

SEQ ID NO: 272129 - protein, 15 aa, Artificial Sequence
  Description of Artificial Sequence: Synthetic peptide
  Seed: SIGKVCRTLLAKSVF
SINKVIRRLLSKSVF

SEQ ID NO: 272130 - protein, 15 aa, Artificial Sequence
  Description of Artificial Sequence: Synthetic peptide
  Seed: SIGKVCRTLLAKSVF
SINKVLRKLLAKSVF

SEQ ID NO: 272131 - protein, 15 aa, Artificial Sequence
  Description of Artificial Sequence: Synthetic peptide
  Seed: SIGKVCRTLLAKSVF
SINKVLRKLLGKSVF

SEQ ID NO: 272132 - protein, 15 aa, Artificial Sequence
  Description of Artificial Sequence: Synthetic peptide
  Seed: SIGKVCRTLLAKSVF
SINKVLRKLLIKSVF

SEQ ID NO: 272133 - protein, 15 aa, Artificial Sequence
  Description of Artificial Sequence: Synthetic peptide
  Seed: SIGKVCRTLLAKSVF
SINKVLRKLLLKSVF

SEQ ID NO: 272134 - protein, 15 aa, Artificial Sequence
  Description of Artificial Sequence: Synthetic peptide
  Seed: SIGKVCRTLLAKSVF
SINKVLRKLLMKSVF

SEQ ID NO: 272135 - protein, 15 aa, Artificial Sequence
  Description of Artificial Sequence: Synthetic peptide
  Seed: SIGKVCRTLLAKSVF
SINKVLRKLLNKSVF

SEQ ID NO: 272136 - protein, 15 aa, Artificial Sequence
  Description of Artificial Sequence: Synthetic peptide
  Seed: SIGKVCRTLLAKSVF
SINKVLRKLLQKSVF

SEQ ID NO: 272137 - protein, 15 aa, Artificial Sequence
  Description of Artificial Sequence: Synthetic peptide
  Seed: SIGKVCRTLLAKSVF
SINKVLRKLLSKSVF

SEQ ID NO: 272138 - protein, 15 aa, Artificial Sequence
  Description of Artificial Sequence: Synthetic peptide
  Seed: SIGKVCRTLLAKSVF
SINKVLRKLLTKSVF

SEQ ID NO: 272139 - protein, 15 aa, Artificial Sequence
  Description of Artificial Sequence: Synthetic peptide
  Seed: SIGKVCRTLLAKSVF
SINKVLRKLLVKSVF

SEQ ID NO: 272140 - protein, 15 aa, Artificial Sequence
  Description of Artificial Sequence: Synthetic peptide
  Seed: SIGKVCRTLLAKSVF
SINKVLRRLLAKSVF

SEQ ID NO: 272141 - protein, 15 aa, Artificial Sequence
  Description of Artificial Sequence: Synthetic peptide
  Seed: SIGKVCRTLLAKSVF
SINKVLRRLLCKSVF

SEQ ID NO: 272142 - protein, 15 aa, Artificial Sequence
  Description of Artificial Sequence: Synthetic peptide
  Seed: SIGKVCRTLLAKSVF
SINKVLRRLLDKSVF

SEQ ID NO: 272143 - protein, 15 aa, Artificial Sequence
  Description of Artificial Sequence: Synthetic peptide
  Seed: SIGKVCRTLLAKSVF
SINKVLRRLLEKSVF

SEQ ID NO: 272144 - protein, 15 aa, Artificial Sequence
  Description of Artificial Sequence: Synthetic peptide
  Seed: SIGKVCRTLLAKSVF
SINKVLRRLLGKSVF

SEQ ID NO: 272145 - protein, 15 aa, Artificial Sequence
  Description of Artificial Sequence: Synthetic peptide
  Seed: SIGKVCRTLLAKSVF
SINKVLRRLLIKSVF

SEQ ID NO: 272146 - protein, 15 aa, Artificial Sequence
  Description of Artificial Sequence: Synthetic peptide
  Seed: SIGKVCRTLLAKSVF
SINKVLRRLLLKSVF

SEQ ID NO: 272147 - protein, 15 aa, Artificial Sequence
  Description of Artificial Sequence: Synthetic peptide
  Seed: SIGKVCRTLLAKSVF
SINKVLRRLLMKSVF

SEQ ID NO: 272148 - protein, 15 aa, Artificial Sequence
  Description of Artificial Sequence: Synthetic peptide
  Seed: SIGKVCRTLLAKSVF
SINKVLRRLLNKSVF

SEQ ID NO: 272149 - protein, 15 aa, Artificial Sequence
  Description of Artificial Sequence: Synthetic peptide
  Seed: SIGKVCRTLLAKSVF
SINKVLRRLLQKSVF

SEQ ID NO: 272150 - protein, 15 aa, Artificial Sequence
  Description of Artificial Sequence: Synthetic peptide
  Seed: SIGKVCRTLLAKSVF
SINKVLRRLLSKSVF

SEQ ID NO: 272151 - protein, 15 aa, Artificial Sequence
  Description of Artificial Sequence: Synthetic peptide
  Seed: SIGKVCRTLLAKSVF
SINKVLRRLLVKSVF

SEQ ID NO: 272152 - protein, 15 aa, Artificial Sequence
  Description of Artificial Sequence: Synthetic peptide
  Seed: SIGKVCRTLLAKSVF
SINKVMRHLLGKSVF

SEQ ID NO: 272153 - protein, 15 aa, Artificial Sequence
  Description of Artificial Sequence: Synthetic peptide
  Seed: SIGKVCRTLLAKSVF
SINKVMRKLLAKSVF

SEQ ID NO: 272154 - protein, 15 aa, Artificial Sequence
  Description of Artificial Sequence: Synthetic peptide
  Seed: SIGKVCRTLLAKSVF
SINKVMRKLLCKSVF

SEQ ID NO: 272155 - protein, 15 aa, Artificial Sequence
  Description of Artificial Sequence: Synthetic peptide
  Seed: SIGKVCRTLLAKSVF
SINKVMRKLLEKSVF

SEQ ID NO: 272156 - protein, 15 aa, Artificial Sequence
  Description of Artificial Sequence: Synthetic peptide
  Seed: SIGKVCRTLLAKSVF
SINKVMRKLLGKSVF

SEQ ID NO: 272157 - protein, 15 aa, Artificial Sequence
  Description of Artificial Sequence: Synthetic peptide
  Seed: SIGKVCRTLLAKSVF
SINKVMRKLLHKSVF

SEQ ID NO: 272158 - protein, 15 aa, Artificial Sequence
  Description of Artificial Sequence: Synthetic peptide
  Seed: SIGKVCRTLLAKSVF
SINKVMRKLLIKSVF

SEQ ID NO: 272159 - protein, 15 aa, Artificial Sequence
  Description of Artificial Sequence: Synthetic peptide
  Seed: SIGKVCRTLLAKSVF
SINKVMRKLLLKSVF

SEQ ID NO: 272160 - protein, 15 aa, Artificial Sequence
  Description of Artificial Sequence: Synthetic peptide
  Seed: SIGKVCRTLLAKSVF
SINKVMRKLLMKSVF

SEQ ID NO: 272161 - protein, 15 aa, Artificial Sequence
  Description of Artificial Sequence: Synthetic peptide
  Seed: SIGKVCRTLLAKSVF
SINKVMRKLLNKSVF

SEQ ID NO: 272162 - protein, 15 aa, Artificial Sequence
  Description of Artificial Sequence: Synthetic peptide
  Seed: SIGKVCRTLLAKSVF
SINKVMRKLLQKSVF

SEQ ID NO: 272163 - protein, 15 aa, Artificial Sequence
  Description of Artificial Sequence: Synthetic peptide
  Seed: SIGKVCRTLLAKSVF
SINKVMRKLLSKSVF

SEQ ID NO: 272164 - protein, 15 aa, Artificial Sequence
  Description of Artificial Sequence: Synthetic peptide
  Seed: SIGKVCRTLLAKSVF
SINKVMRKLLTKSVF

SEQ ID NO: 272165 - protein, 15 aa, Artificial Sequence
  Description of Artificial Sequence: Synthetic peptide
  Seed: SIGKVCRTLLAKSVF
SINKVMRKLLVKSVF

SEQ ID NO: 272166 - protein, 15 aa, Artificial Sequence
  Description of Artificial Sequence: Synthetic peptide
  Seed: SIGKVCRTLLAKSVF
SINKVMRKLLYKSVF

SEQ ID NO: 272167 - protein, 15 aa, Artificial Sequence
  Description of Artificial Sequence: Synthetic peptide
  Seed: SIGKVCRTLLAKSVF
SINKVMRRLLAKSVF

SEQ ID NO: 272168 - protein, 15 aa, Artificial Sequence
  Description of Artificial Sequence: Synthetic peptide
  Seed: SIGKVCRTLLAKSVF
SINKVMRRLLCKSVF

SEQ ID NO: 272169 - protein, 15 aa, Artificial Sequence
  Description of Artificial Sequence: Synthetic peptide
  Seed: SIGKVCRTLLAKSVF
SINKVMRRLLDKSVF

SEQ ID NO: 272170 - protein, 15 aa, Artificial Sequence
  Description of Artificial Sequence: Synthetic peptide
  Seed: SIGKVCRTLLAKSVF
SINKVMRRLLEKSVF

SEQ ID NO: 272171 - protein, 15 aa, Artificial Sequence
  Description of Artificial Sequence: Synthetic peptide
  Seed: SIGKVCRTLLAKSVF
SINKVMRRLLGKSVF

SEQ ID NO: 272172 - protein, 15 aa, Artificial Sequence
  Description of Artificial Sequence: Synthetic peptide
  Seed: SIGKVCRTLLAKSVF
SINKVMRRLLHKSVF

SEQ ID NO: 272173 - protein, 15 aa, Artificial Sequence
  Description of Artificial Sequence: Synthetic peptide
  Seed: SIGKVCRTLLAKSVF
SINKVMRRLLIKSVF

SEQ ID NO: 272174 - protein, 15 aa, Artificial Sequence
  Description of Artificial Sequence: Synthetic peptide
  Seed: SIGKVCRTLLAKSVF
SINKVMRRLLLKSVF

SEQ ID NO: 272175 - protein, 15 aa, Artificial Sequence
  Description of Artificial Sequence: Synthetic peptide
  Seed: SIGKVCRTLLAKSVF
SINKVMRRLLMKSVF

SEQ ID NO: 272176 - protein, 15 aa, Artificial Sequence
  Description of Artificial Sequence: Synthetic peptide
  Seed: SIGKVCRTLLAKSVF
SINKVMRRLLNKSVF

SEQ ID NO: 272177 - protein, 15 aa, Artificial Sequence
  Description of Artificial Sequence: Synthetic peptide
  Seed: SIGKVCRTLLAKSVF
SINKVMRRLLQKSVF

SEQ ID NO: 272178 - protein, 15 aa, Artificial Sequence
  Description of Artificial Sequence: Synthetic peptide
  Seed: SIGKVCRTLLAKSVF
SINKVMRRLLSKSVF

SEQ ID NO: 272179 - protein, 15 aa, Artificial Sequence
  Description of Artificial Sequence: Synthetic peptide
  Seed: SIGKVCRTLLAKSVF
SINKVMRRLLTKSVF

SEQ ID NO: 272180 - protein, 15 aa, Artificial Sequence
  Description of Artificial Sequence: Synthetic peptide
  Seed: SIGKVCRTLLAKSVF
SINKVMRRLLVKSVF

SEQ ID NO: 272181 - protein, 15 aa, Artificial Sequence
  Description of Artificial Sequence: Synthetic peptide
  Seed: SIGKVCRTLLAKSVF
SINKVMRRLLYKSVF

SEQ ID NO: 272182 - protein, 15 aa, Artificial Sequence
  Description of Artificial Sequence: Synthetic peptide
  Seed: SIGKVCRTLLAKSVF
SINKVMRSLLAKSVF

SEQ ID NO: 272183 - protein, 15 aa, Artificial Sequence
  Description of Artificial Sequence: Synthetic peptide
  Seed: SIGKVCRTLLAKSVF
SINKVMRSLLQKSVF

SEQ ID NO: 272184 - protein, 15 aa, Artificial Sequence
  Description of Artificial Sequence: Synthetic peptide
  Seed: SIGKVCRTLLAKSVF
SINKVMRSLLSKSVF

SEQ ID NO: 272185 - protein, 15 aa, Artificial Sequence
  Description of Artificial Sequence: Synthetic peptide
  Seed: SIGKVCRTLLAKSVF
SINKVMRTLLAKSVF

SEQ ID NO: 272186 - protein, 15 aa, Artificial Sequence
  Description of Artificial Sequence: Synthetic peptide
  Seed: SIGKVCRTLLAKSVF
SINKVMRTLLSKSVF

SEQ ID NO: 272187 - protein, 15 aa, Artificial Sequence
  Description of Artificial Sequence: Synthetic peptide
  Seed: SIGKVCRTLLAKSVF
SINKVQRKLLAKSVF

SEQ ID NO: 272188 - protein, 15 aa, Artificial Sequence
  Description of Artificial Sequence: Synthetic peptide
  Seed: SIGKVCRTLLAKSVF
SINKVQRRLLAKSVF

SEQ ID NO: 272189 - protein, 15 aa, Artificial Sequence
  Description of Artificial Sequence: Synthetic peptide
  Seed: SIGKVCRTLLAKSVF
SINKVQRRLLGKSVF

SEQ ID NO: 272190 - protein, 15 aa, Artificial Sequence
  Description of Artificial Sequence: Synthetic peptide
  Seed: SIGKVCRTLLAKSVF
SINKVQRRLLSKSVF

SEQ ID NO: 272191 - protein, 15 aa, Artificial Sequence
  Description of Artificial Sequence: Synthetic peptide
  Seed: SIGKVCRTLLAKSVF
SINKVVRKLLAKSVF

SEQ ID NO: 272192 - protein, 15 aa, Artificial Sequence
  Description of Artificial Sequence: Synthetic peptide
  Seed: SIGKVCRTLLAKSVF
SINKVVRKLLGKSVF

SEQ ID NO: 272193 - protein, 15 aa, Artificial Sequence
  Description of Artificial Sequence: Synthetic peptide
  Seed: SIGKVCRTLLAKSVF
SINKVVRKLLQKSVF

SEQ ID NO: 272194 - protein, 15 aa, Artificial Sequence
  Description of Artificial Sequence: Synthetic peptide
  Seed: SIGKVCRTLLAKSVF
SINKVVRKLLSKSVF

SEQ ID NO: 272195 - protein, 15 aa, Artificial Sequence
  Description of Artificial Sequence: Synthetic peptide
  Seed: SIGKVCRTLLAKSVF
SINKVVRRLLAKSVF

SEQ ID NO: 272196 - protein, 15 aa, Artificial Sequence
  Description of Artificial Sequence: Synthetic peptide
  Seed: SIGKVCRTLLAKSVF
SINKVVRRLLGKSVF

SEQ ID NO: 272197 - protein, 15 aa, Artificial Sequence
  Description of Artificial Sequence: Synthetic peptide
  Seed: SIGKVCRTLLAKSVF
SINKVVRRLLQKSVF

SEQ ID NO: 272198 - protein, 15 aa, Artificial Sequence
  Description of Artificial Sequence: Synthetic peptide
  Seed: SIGKVCRTLLAKSVF
SINKVVRRLLSKSVF

SEQ ID NO: 272199 - protein, 15 aa, Artificial Sequence
  Description of Artificial Sequence: Synthetic peptide
  Seed: SIGKVCRTLLAKSVF
SINKVWRKLLAKSVF

SEQ ID NO: 272200 - protein, 15 aa, Artificial Sequence
  Description of Artificial Sequence: Synthetic peptide
  Seed: SIGKVCRTLLAKSVF
SINKVWRKLLSKSVF

SEQ ID NO: 272201 - protein, 15 aa, Artificial Sequence
  Description of Artificial Sequence: Synthetic peptide
  Seed: SIGKVCRTLLAKSVF
SINKVWRRLLGKSVF

SEQ ID NO: 272202 - protein, 15 aa, Artificial Sequence
  Description of Artificial Sequence: Synthetic peptide
  Seed: SIGKVCRTLLAKSVF
SINKVYRKLLAKSVF

SEQ ID NO: 272203 - protein, 15 aa, Artificial Sequence
  Description of Artificial Sequence: Synthetic peptide
  Seed: SIGKVCRTLLAKSVF
SIPKVARRLLRKSVF

SEQ ID NO: 272204 - protein, 15 aa, Artificial Sequence
  Description of Artificial Sequence: Synthetic peptide
  Seed: SIGKVCRTLLAKSVF
SIPKVFRKLLAKSVF

SEQ ID NO: 272205 - protein, 15 aa, Artificial Sequence
  Description of Artificial Sequence: Synthetic peptide
  Seed: SIGKVCRTLLAKSVF
SIPKVFRKLLSKSVF

SEQ ID NO: 272206 - protein, 15 aa, Artificial Sequence
  Description of Artificial Sequence: Synthetic peptide
  Seed: SIGKVCRTLLAKSVF
SIPKVFRRLLAKSVF

SEQ ID NO: 272207 - protein, 15 aa, Artificial Sequence
  Description of Artificial Sequence: Synthetic peptide
  Seed: SIGKVCRTLLAKSVF
SIPKVFRRLLSKSVF

SEQ ID NO: 272208 - protein, 15 aa, Artificial Sequence
  Description of Artificial Sequence: Synthetic peptide
  Seed: SIGKVCRTLLAKSVF
SIPKVIRKLLAKSVF

SEQ ID NO: 272209 - protein, 15 aa, Artificial Sequence
  Description of Artificial Sequence: Synthetic peptide
  Seed: SIGKVCRTLLAKSVF
SIPKVIRKLLGKSVF

SEQ ID NO: 272210 - protein, 15 aa, Artificial Sequence
  Description of Artificial Sequence: Synthetic peptide
  Seed: SIGKVCRTLLAKSVF
SIPKVIRKLLQKSVF

SEQ ID NO: 272211 - protein, 15 aa, Artificial Sequence
  Description of Artificial Sequence: Synthetic peptide
  Seed: SIGKVCRTLLAKSVF
SIPKVIRKLLSKSVF

SEQ ID NO: 272212 - protein, 15 aa, Artificial Sequence
  Description of Artificial Sequence: Synthetic peptide
  Seed: SIGKVCRTLLAKSVF
SIPKVIRRLLAKSVF

SEQ ID NO: 272213 - protein, 15 aa, Artificial Sequence
  Description of Artificial Sequence: Synthetic peptide
  Seed: SIGKVCRTLLAKSVF
SIPKVIRRLLGKSVF

SEQ ID NO: 272214 - protein, 15 aa, Artificial Sequence
  Description of Artificial Sequence: Synthetic peptide
  Seed: SIGKVCRTLLAKSVF
SIPKVIRRLLMKSVF

SEQ ID NO: 272215 - protein, 15 aa, Artificial Sequence
  Description of Artificial Sequence: Synthetic peptide
  Seed: SIGKVCRTLLAKSVF
SIPKVIRRLLQKSVF

SEQ ID NO: 272216 - protein, 15 aa, Artificial Sequence
  Description of Artificial Sequence: Synthetic peptide
  Seed: SIGKVCRTLLAKSVF
SIPKVIRRLLSKSVF

SEQ ID NO: 272217 - protein, 15 aa, Artificial Sequence
  Description of Artificial Sequence: Synthetic peptide
  Seed: SIGKVCRTLLAKSVF
SIPKVLRKLLAKSVF

SEQ ID NO: 272218 - protein, 15 aa, Artificial Sequence
  Description of Artificial Sequence: Synthetic peptide
  Seed: SIGKVCRTLLAKSVF
SIPKVLRKLLGKSVF

SEQ ID NO: 272219 - protein, 15 aa, Artificial Sequence
  Description of Artificial Sequence: Synthetic peptide
  Seed: SIGKVCRTLLAKSVF
SIPKVLRKLLSKSVF

SEQ ID NO: 272220 - protein, 15 aa, Artificial Sequence
  Description of Artificial Sequence: Synthetic peptide
  Seed: SIGKVCRTLLAKSVF
SIPKVLRKLLTKSVF

SEQ ID NO: 272221 - protein, 15 aa, Artificial Sequence
  Description of Artificial Sequence: Synthetic peptide
  Seed: SIGKVCRTLLAKSVF
SIPKVLRRLLAKSVF

SEQ ID NO: 272222 - protein, 15 aa, Artificial Sequence
  Description of Artificial Sequence: Synthetic peptide
  Seed: SIGKVCRTLLAKSVF
SIPKVLRRLLGKSVF

SEQ ID NO: 272223 - protein, 15 aa, Artificial Sequence
  Description of Artificial Sequence: Synthetic peptide
  Seed: SIGKVCRTLLAKSVF
SIPKVLRRLLQKSVF

SEQ ID NO: 272224 - protein, 15 aa, Artificial Sequence
  Description of Artificial Sequence: Synthetic peptide
  Seed: SIGKVCRTLLAKSVF
SIPKVLRRLLSKSVF

SEQ ID NO: 272225 - protein, 15 aa, Artificial Sequence
  Description of Artificial Sequence: Synthetic peptide
  Seed: SIGKVCRTLLAKSVF
SIPKVLRRLLVKSVF

SEQ ID NO: 272226 - protein, 15 aa, Artificial Sequence
  Description of Artificial Sequence: Synthetic peptide
  Seed: SIGKVCRTLLAKSVF
SIPKVMRKLLAKSVF

SEQ ID NO: 272227 - protein, 15 aa, Artificial Sequence
  Description of Artificial Sequence: Synthetic peptide
  Seed: SIGKVCRTLLAKSVF
SIPKVMRKLLGKSVF

SEQ ID NO: 272228 - protein, 15 aa, Artificial Sequence
  Description of Artificial Sequence: Synthetic peptide
  Seed: SIGKVCRTLLAKSVF
SIPKVMRKLLHKSVF

SEQ ID NO: 272229 - protein, 15 aa, Artificial Sequence
  Description of Artificial Sequence: Synthetic peptide
  Seed: SIGKVCRTLLAKSVF
SIPKVMRKLLQKSVF

SEQ ID NO: 272230 - protein, 15 aa, Artificial Sequence
  Description of Artificial Sequence: Synthetic peptide
  Seed: SIGKVCRTLLAKSVF
SIPKVMRKLLSKSVF

SEQ ID NO: 272231 - protein, 15 aa, Artificial Sequence
  Description of Artificial Sequence: Synthetic peptide
  Seed: SIGKVCRTLLAKSVF
SIPKVMRKLLTKSVF

SEQ ID NO: 272232 - protein, 15 aa, Artificial Sequence
  Description of Artificial Sequence: Synthetic peptide
  Seed: SIGKVCRTLLAKSVF
SIPKVMRRLLAKSVF

SEQ ID NO: 272233 - protein, 15 aa, Artificial Sequence
  Description of Artificial Sequence: Synthetic peptide
  Seed: SIGKVCRTLLAKSVF
SIPKVMRRLLGKSVF

SEQ ID NO: 272234 - protein, 15 aa, Artificial Sequence
  Description of Artificial Sequence: Synthetic peptide
  Seed: SIGKVCRTLLAKSVF
SIPKVMRRLLHKSVF

SEQ ID NO: 272235 - protein, 15 aa, Artificial Sequence
  Description of Artificial Sequence: Synthetic peptide
  Seed: SIGKVCRTLLAKSVF
SIPKVMRRLLMKSVF

SEQ ID NO: 272236 - protein, 15 aa, Artificial Sequence
  Description of Artificial Sequence: Synthetic peptide
  Seed: SIGKVCRTLLAKSVF
SIPKVMRRLLNKSVF

SEQ ID NO: 272237 - protein, 15 aa, Artificial Sequence
  Description of Artificial Sequence: Synthetic peptide
  Seed: SIGKVCRTLLAKSVF
SIPKVMRRLLQKSVF

SEQ ID NO: 272238 - protein, 15 aa, Artificial Sequence
  Description of Artificial Sequence: Synthetic peptide
  Seed: SIGKVCRTLLAKSVF
SIPKVMRRLLSKSVF

SEQ ID NO: 272239 - protein, 15 aa, Artificial Sequence
  Description of Artificial Sequence: Synthetic peptide
  Seed: SIGKVCRTLLAKSVF
SIPKVMRRLLTKSVF

SEQ ID NO: 272240 - protein, 15 aa, Artificial Sequence
  Description of Artificial Sequence: Synthetic peptide
  Seed: SIGKVCRTLLAKSVF
SIPKVMRRLLVKSVF

SEQ ID NO: 272241 - protein, 15 aa, Artificial Sequence
  Description of Artificial Sequence: Synthetic peptide
  Seed: SIGKVCRTLLAKSVF
SIPKVVRKLLAKSVF

SEQ ID NO: 272242 - protein, 15 aa, Artificial Sequence
  Description of Artificial Sequence: Synthetic peptide
  Seed: SIGKVCRTLLAKSVF
SIPKVVRKLLSKSVF

SEQ ID NO: 272243 - protein, 15 aa, Artificial Sequence
  Description of Artificial Sequence: Synthetic peptide
  Seed: SIGKVCRTLLAKSVF
SIPKVVRRLLAKSVF

SEQ ID NO: 272244 - protein, 15 aa, Artificial Sequence
  Description of Artificial Sequence: Synthetic peptide
  Seed: SIGKVCRTLLAKSVF
SIPKVVRRLLGKSVF

SEQ ID NO: 272245 - protein, 15 aa, Artificial Sequence
  Description of Artificial Sequence: Synthetic peptide
  Seed: SIGKVCRTLLAKSVF
SIPKVVRRLLSKSVF

SEQ ID NO: 272246 - protein, 15 aa, Artificial Sequence
  Description of Artificial Sequence: Synthetic peptide
  Seed: SIGKVCRTLLAKSVF
SIQKVARKLLAKSVF

SEQ ID NO: 272247 - protein, 15 aa, Artificial Sequence
  Description of Artificial Sequence: Synthetic peptide
  Seed: SIGKVCRTLLAKSVF
SIQKVARKLLGKSVF

SEQ ID NO: 272248 - protein, 15 aa, Artificial Sequence
  Description of Artificial Sequence: Synthetic peptide
  Seed: SIGKVCRTLLAKSVF
SIQKVARRLLAKSVF

SEQ ID NO: 272249 - protein, 15 aa, Artificial Sequence
  Description of Artificial Sequence: Synthetic peptide
  Seed: SIGKVCRTLLAKSVF
SIQKVARRLLGKSVF

SEQ ID NO: 272250 - protein, 15 aa, Artificial Sequence
  Description of Artificial Sequence: Synthetic peptide
  Seed: SIGKVCRTLLAKSVF
SIQKVARRLLQKSVF

SEQ ID NO: 272251 - protein, 15 aa, Artificial Sequence
  Description of Artificial Sequence: Synthetic peptide
  Seed: SIGKVCRTLLAKSVF
SIQKVARRLLSKSVF

SEQ ID NO: 272252 - protein, 15 aa, Artificial Sequence
  Description of Artificial Sequence: Synthetic peptide
  Seed: SIGKVCRTLLAKSVF
SIQKVCRKLLAKSVF

SEQ ID NO: 272253 - protein, 15 aa, Artificial Sequence
  Description of Artificial Sequence: Synthetic peptide
  Seed: SIGKVCRTLLAKSVF
SIQKVCRKLLSKSVF

SEQ ID NO: 272254 - protein, 15 aa, Artificial Sequence
  Description of Artificial Sequence: Synthetic peptide
  Seed: SIGKVCRTLLAKSVF
SIQKVCRRLLAKSVF

SEQ ID NO: 272255 - protein, 15 aa, Artificial Sequence
  Description of Artificial Sequence: Synthetic peptide
  Seed: SIGKVCRTLLAKSVF
SIQKVCRRLLGKSVF

SEQ ID NO: 272256 - protein, 15 aa, Artificial Sequence
  Description of Artificial Sequence: Synthetic peptide
  Seed: SIGKVCRTLLAKSVF
SIQKVCRRLLQKSVF

SEQ ID NO: 272257 - protein, 15 aa, Artificial Sequence
  Description of Artificial Sequence: Synthetic peptide
  Seed: SIGKVCRTLLAKSVF
SIQKVCRRLLSKSVF

SEQ ID NO: 272258 - protein, 15 aa, Artificial Sequence
  Description of Artificial Sequence: Synthetic peptide
  Seed: SIGKVCRTLLAKSVF
SIQKVCRRLLTKSVF

SEQ ID NO: 272259 - protein, 15 aa, Artificial Sequence
  Description of Artificial Sequence: Synthetic peptide
  Seed: SIGKVCRTLLAKSVF
SIQKVCRRLLVKSVF

SEQ ID NO: 272260 - protein, 15 aa, Artificial Sequence
  Description of Artificial Sequence: Synthetic peptide
  Seed: SIGKVCRTLLAKSVF
SIQKVFRKLLAKSVF

SEQ ID NO: 272261 - protein, 15 aa, Artificial Sequence
  Description of Artificial Sequence: Synthetic peptide
  Seed: SIGKVCRTLLAKSVF
SIQKVFRKLLGKSVF

SEQ ID NO: 272262 - protein, 15 aa, Artificial Sequence
  Description of Artificial Sequence: Synthetic peptide
  Seed: SIGKVCRTLLAKSVF
SIQKVFRKLLMKSVF

SEQ ID NO: 272263 - protein, 15 aa, Artificial Sequence
  Description of Artificial Sequence: Synthetic peptide
  Seed: SIGKVCRTLLAKSVF
SIQKVFRKLLQKSVF

SEQ ID NO: 272264 - protein, 15 aa, Artificial Sequence
  Description of Artificial Sequence: Synthetic peptide
  Seed: SIGKVCRTLLAKSVF
SIQKVFRKLLSKSVF

SEQ ID NO: 272265 - protein, 15 aa, Artificial Sequence
  Description of Artificial Sequence: Synthetic peptide
  Seed: SIGKVCRTLLAKSVF
SIQKVFRKLLVKSVF

SEQ ID NO: 272266 - protein, 15 aa, Artificial Sequence
  Description of Artificial Sequence: Synthetic peptide
  Seed: SIGKVCRTLLAKSVF
SIQKVFRRLLAKSVF

SEQ ID NO: 272267 - protein, 15 aa, Artificial Sequence
  Description of Artificial Sequence: Synthetic peptide
  Seed: SIGKVCRTLLAKSVF
SIQKVFRRLLGKSVF

SEQ ID NO: 272268 - protein, 15 aa, Artificial Sequence
  Description of Artificial Sequence: Synthetic peptide
  Seed: SIGKVCRTLLAKSVF
SIQKVFRRLLMKSVF

SEQ ID NO: 272269 - protein, 15 aa, Artificial Sequence
  Description of Artificial Sequence: Synthetic peptide
  Seed: SIGKVCRTLLAKSVF
SIQKVFRRLLQKSVF

SEQ ID NO: 272270 - protein, 15 aa, Artificial Sequence
  Description of Artificial Sequence: Synthetic peptide
  Seed: SIGKVCRTLLAKSVF
SIQKVFRRLLSKSVF

SEQ ID NO: 272271 - protein, 15 aa, Artificial Sequence
  Description of Artificial Sequence: Synthetic peptide
  Seed: SIGKVCRTLLAKSVF
SIQKVFRRLLVKSVF

SEQ ID NO: 272272 - protein, 15 aa, Artificial Sequence
  Description of Artificial Sequence: Synthetic peptide
  Seed: SIGKVCRTLLAKSVF
SIQKVIRKLLAKSVF

SEQ ID NO: 272273 - protein, 15 aa, Artificial Sequence
  Description of Artificial Sequence: Synthetic peptide
  Seed: SIGKVCRTLLAKSVF
SIQKVIRKLLCKSVF

SEQ ID NO: 272274 - protein, 15 aa, Artificial Sequence
  Description of Artificial Sequence: Synthetic peptide
  Seed: SIGKVCRTLLAKSVF
SIQKVIRKLLGKSVF

SEQ ID NO: 272275 - protein, 15 aa, Artificial Sequence
  Description of Artificial Sequence: Synthetic peptide
  Seed: SIGKVCRTLLAKSVF
SIQKVIRKLLIKSVF

SEQ ID NO: 272276 - protein, 15 aa, Artificial Sequence
  Description of Artificial Sequence: Synthetic peptide
  Seed: SIGKVCRTLLAKSVF
SIQKVIRKLLLKSVF

SEQ ID NO: 272277 - protein, 15 aa, Artificial Sequence
  Description of Artificial Sequence: Synthetic peptide
  Seed: SIGKVCRTLLAKSVF
SIQKVIRKLLMKSVF

SEQ ID NO: 272278 - protein, 15 aa, Artificial Sequence
  Description of Artificial Sequence: Synthetic peptide
  Seed: SIGKVCRTLLAKSVF
SIQKVIRKLLQKSVF

SEQ ID NO: 272279 - protein, 15 aa, Artificial Sequence
  Description of Artificial Sequence: Synthetic peptide
  Seed: SIGKVCRTLLAKSVF
SIQKVIRKLLSKSVF

SEQ ID NO: 272280 - protein, 15 aa, Artificial Sequence
  Description of Artificial Sequence: Synthetic peptide
  Seed: SIGKVCRTLLAKSVF
SIQKVIRKLLVKSVF

SEQ ID NO: 272281 - protein, 15 aa, Artificial Sequence
  Description of Artificial Sequence: Synthetic peptide
  Seed: SIGKVCRTLLAKSVF
SIQKVIRRLLAKSVF

SEQ ID NO: 272282 - protein, 15 aa, Artificial Sequence
  Description of Artificial Sequence: Synthetic peptide
  Seed: SIGKVCRTLLAKSVF
SIQKVIRRLLCKSVF

SEQ ID NO: 272283 - protein, 15 aa, Artificial Sequence
  Description of Artificial Sequence: Synthetic peptide
  Seed: SIGKVCRTLLAKSVF
SIQKVIRRLLGKSVF

SEQ ID NO: 272284 - protein, 15 aa, Artificial Sequence
  Description of Artificial Sequence: Synthetic peptide
  Seed: SIGKVCRTLLAKSVF
SIQKVIRRLLHKSVF

SEQ ID NO: 272285 - protein, 15 aa, Artificial Sequence
  Description of Artificial Sequence: Synthetic peptide
  Seed: SIGKVCRTLLAKSVF
SIQKVIRRLLLKSVF

SEQ ID NO: 272286 - protein, 15 aa, Artificial Sequence
  Description of Artificial Sequence: Synthetic peptide
  Seed: SIGKVCRTLLAKSVF
SIQKVIRRLLMKSVF

SEQ ID NO: 272287 - protein, 15 aa, Artificial Sequence
  Description of Artificial Sequence: Synthetic peptide
  Seed: SIGKVCRTLLAKSVF
SIQKVIRRLLQKSVF

SEQ ID NO: 272288 - protein, 15 aa, Artificial Sequence
  Description of Artificial Sequence: Synthetic peptide
  Seed: SIGKVCRTLLAKSVF
SIQKVIRRLLSKSVF

SEQ ID NO: 272289 - protein, 15 aa, Artificial Sequence
  Description of Artificial Sequence: Synthetic peptide
  Seed: SIGKVCRTLLAKSVF
SIQKVIRRLLTKSVF

SEQ ID NO: 272290 - protein, 15 aa, Artificial Sequence
  Description of Artificial Sequence: Synthetic peptide
  Seed: SIGKVCRTLLAKSVF
SIQKVIRRLLVKSVF

SEQ ID NO: 272291 - protein, 15 aa, Artificial Sequence
  Description of Artificial Sequence: Synthetic peptide
  Seed: SIGKVCRTLLAKSVF
SIQKVLRHLLGKSVF

SEQ ID NO: 272292 - protein, 15 aa, Artificial Sequence
  Description of Artificial Sequence: Synthetic peptide
  Seed: SIGKVCRTLLAKSVF
SIQKVLRKLLAKSVF

SEQ ID NO: 272293 - protein, 15 aa, Artificial Sequence
  Description of Artificial Sequence: Synthetic peptide
  Seed: SIGKVCRTLLAKSVF
SIQKVLRKLLCKSVF

SEQ ID NO: 272294 - protein, 15 aa, Artificial Sequence
  Description of Artificial Sequence: Synthetic peptide
  Seed: SIGKVCRTLLAKSVF
SIQKVLRKLLEKSVF

SEQ ID NO: 272295 - protein, 15 aa, Artificial Sequence
  Description of Artificial Sequence: Synthetic peptide
  Seed: SIGKVCRTLLAKSVF
SIQKVLRKLLGKSVF

SEQ ID NO: 272296 - protein, 15 aa, Artificial Sequence
  Description of Artificial Sequence: Synthetic peptide
  Seed: SIGKVCRTLLAKSVF
SIQKVLRKLLHKSVF

SEQ ID NO: 272297 - protein, 15 aa, Artificial Sequence
  Description of Artificial Sequence: Synthetic peptide
  Seed: SIGKVCRTLLAKSVF
SIQKVLRKLLIKSVF

SEQ ID NO: 272298 - protein, 15 aa, Artificial Sequence
  Description of Artificial Sequence: Synthetic peptide
  Seed: SIGKVCRTLLAKSVF
SIQKVLRKLLLKSVF

SEQ ID NO: 272299 - protein, 15 aa, Artificial Sequence
  Description of Artificial Sequence: Synthetic peptide
  Seed: SIGKVCRTLLAKSVF
SIQKVLRKLLMKSVF

SEQ ID NO: 272300 - protein, 15 aa, Artificial Sequence
  Description of Artificial Sequence: Synthetic peptide
  Seed: SIGKVCRTLLAKSVF
SIQKVLRKLLNKSVF

SEQ ID NO: 272301 - protein, 15 aa, Artificial Sequence
  Description of Artificial Sequence: Synthetic peptide
  Seed: SIGKVCRTLLAKSVF
SIQKVLRKLLQKSVF

SEQ ID NO: 272302 - protein, 15 aa, Artificial Sequence
  Description of Artificial Sequence: Synthetic peptide
  Seed: SIGKVCRTLLAKSVF
SIQKVLRKLLSKSVF

SEQ ID NO: 272303 - protein, 15 aa, Artificial Sequence
  Description of Artificial Sequence: Synthetic peptide
  Seed: SIGKVCRTLLAKSVF
SIQKVLRKLLTKSVF

SEQ ID NO: 272304 - protein, 15 aa, Artificial Sequence
  Description of Artificial Sequence: Synthetic peptide
  Seed: SIGKVCRTLLAKSVF
SIQKVLRKLLVKSVF

SEQ ID NO: 272305 - protein, 15 aa, Artificial Sequence
  Description of Artificial Sequence: Synthetic peptide
  Seed: SIGKVCRTLLAKSVF
SIQKVLRRLLAKSVF

SEQ ID NO: 272306 - protein, 15 aa, Artificial Sequence
  Description of Artificial Sequence: Synthetic peptide
  Seed: SIGKVCRTLLAKSVF
SIQKVLRRLLCKSVF

SEQ ID NO: 272307 - protein, 15 aa, Artificial Sequence
  Description of Artificial Sequence: Synthetic peptide
  Seed: SIGKVCRTLLAKSVF
SIQKVLRRLLDKSVF

SEQ ID NO: 272308 - protein, 15 aa, Artificial Sequence
  Description of Artificial Sequence: Synthetic peptide
  Seed: SIGKVCRTLLAKSVF
SIQKVLRRLLEKSVF

SEQ ID NO: 272309 - protein, 15 aa, Artificial Sequence
  Description of Artificial Sequence: Synthetic peptide
  Seed: SIGKVCRTLLAKSVF
SIQKVLRRLLGKSVF

SEQ ID NO: 272310 - protein, 15 aa, Artificial Sequence
  Description of Artificial Sequence: Synthetic peptide
  Seed: SIGKVCRTLLAKSVF
SIQKVLRRLLHKSVF

SEQ ID NO: 272311 - protein, 15 aa, Artificial Sequence
  Description of Artificial Sequence: Synthetic peptide
  Seed: SIGKVCRTLLAKSVF
SIQKVLRRLLIKSVF

SEQ ID NO: 272312 - protein, 15 aa, Artificial Sequence
  Description of Artificial Sequence: Synthetic peptide
  Seed: SIGKVCRTLLAKSVF
SIQKVLRRLLLKSVF

SEQ ID NO: 272313 - protein, 15 aa, Artificial Sequence
  Description of Artificial Sequence: Synthetic peptide
  Seed: SIGKVCRTLLAKSVF
SIQKVLRRLLMKSVF

SEQ ID NO: 272314 - protein, 15 aa, Artificial Sequence
  Description of Artificial Sequence: Synthetic peptide
  Seed: SIGKVCRTLLAKSVF
SIQKVLRRLLNKSVF

SEQ ID NO: 272315 - protein, 15 aa, Artificial Sequence
  Description of Artificial Sequence: Synthetic peptide
  Seed: SIGKVCRTLLAKSVF
SIQKVLRRLLQKSVF

SEQ ID NO: 272316 - protein, 15 aa, Artificial Sequence
  Description of Artificial Sequence: Synthetic peptide
  Seed: SIGKVCRTLLAKSVF
SIQKVLRRLLSKSVF

SEQ ID NO: 272317 - protein, 15 aa, Artificial Sequence
  Description of Artificial Sequence: Synthetic peptide
  Seed: SIGKVCRTLLAKSVF
SIQKVLRRLLTKSVF

SEQ ID NO: 272318 - protein, 15 aa, Artificial Sequence
  Description of Artificial Sequence: Synthetic peptide
  Seed: SIGKVCRTLLAKSVF
SIQKVLRRLLVKSVF

SEQ ID NO: 272319 - protein, 15 aa, Artificial Sequence
  Description of Artificial Sequence: Synthetic peptide
  Seed: SIGKVCRTLLAKSVF
SIQKVLRTLLAKSVF

SEQ ID NO: 272320 - protein, 15 aa, Artificial Sequence
  Description of Artificial Sequence: Synthetic peptide
  Seed: SIGKVCRTLLAKSVF
SIQKVLRTLLSKSVF

SEQ ID NO: 272321 - protein, 15 aa, Artificial Sequence
  Description of Artificial Sequence: Synthetic peptide
  Seed: SIGKVCRTLLAKSVF
SIQKVMRHLLAKSVF

SEQ ID NO: 272322 - protein, 15 aa, Artificial Sequence
  Description of Artificial Sequence: Synthetic peptide
  Seed: SIGKVCRTLLAKSVF
SIQKVMRHLLGKSVF

SEQ ID NO: 272323 - protein, 15 aa, Artificial Sequence
  Description of Artificial Sequence: Synthetic peptide
  Seed: SIGKVCRTLLAKSVF
SIQKVMRHLLQKSVF

SEQ ID NO: 272324 - protein, 15 aa, Artificial Sequence
  Description of Artificial Sequence: Synthetic peptide
  Seed: SIGKVCRTLLAKSVF
SIQKVMRKLLAKSVF

SEQ ID NO: 272325 - protein, 15 aa, Artificial Sequence
  Description of Artificial Sequence: Synthetic peptide
  Seed: SIGKVCRTLLAKSVF
SIQKVMRKLLCKSVF

SEQ ID NO: 272326 - protein, 15 aa, Artificial Sequence
  Description of Artificial Sequence: Synthetic peptide
  Seed: SIGKVCRTLLAKSVF
SIQKVMRKLLDKSVF

SEQ ID NO: 272327 - protein, 15 aa, Artificial Sequence
  Description of Artificial Sequence: Synthetic peptide
  Seed: SIGKVCRTLLAKSVF
SIQKVMRKLLEKSVF

SEQ ID NO: 272328 - protein, 15 aa, Artificial Sequence
  Description of Artificial Sequence: Synthetic peptide
  Seed: SIGKVCRTLLAKSVF
SIQKVMRKLLGKSVF

SEQ ID NO: 272329 - protein, 15 aa, Artificial Sequence
  Description of Artificial Sequence: Synthetic peptide
  Seed: SIGKVCRTLLAKSVF
SIQKVMRKLLHKSVF

SEQ ID NO: 272330 - protein, 15 aa, Artificial Sequence
  Description of Artificial Sequence: Synthetic peptide
  Seed: SIGKVCRTLLAKSVF
SIQKVMRKLLIKSVF

SEQ ID NO: 272331 - protein, 15 aa, Artificial Sequence
  Description of Artificial Sequence: Synthetic peptide
  Seed: SIGKVCRTLLAKSVF
SIQKVMRKLLLKSVF

SEQ ID NO: 272332 - protein, 15 aa, Artificial Sequence
  Description of Artificial Sequence: Synthetic peptide
  Seed: SIGKVCRTLLAKSVF
SIQKVMRKLLMKSVF

SEQ ID NO: 272333 - protein, 15 aa, Artificial Sequence
  Description of Artificial Sequence: Synthetic peptide
  Seed: SIGKVCRTLLAKSVF
SIQKVMRKLLNKSVF

SEQ ID NO: 272334 - protein, 15 aa, Artificial Sequence
  Description of Artificial Sequence: Synthetic peptide
  Seed: SIGKVCRTLLAKSVF
SIQKVMRKLLQKSVF

SEQ ID NO: 272335 - protein, 15 aa, Artificial Sequence
  Description of Artificial Sequence: Synthetic peptide
  Seed: SIGKVCRTLLAKSVF
SIQKVMRKLLSKSVF

SEQ ID NO: 272336 - protein, 15 aa, Artificial Sequence
  Description of Artificial Sequence: Synthetic peptide
  Seed: SIGKVCRTLLAKSVF
SIQKVMRKLLTKSVF

SEQ ID NO: 272337 - protein, 15 aa, Artificial Sequence
  Description of Artificial Sequence: Synthetic peptide
  Seed: SIGKVCRTLLAKSVF
SIQKVMRKLLVKSVF

SEQ ID NO: 272338 - protein, 15 aa, Artificial Sequence
  Description of Artificial Sequence: Synthetic peptide
  Seed: SIGKVCRTLLAKSVF
SIQKVMRKLLYKSVF

SEQ ID NO: 272339 - protein, 15 aa, Artificial Sequence
  Description of Artificial Sequence: Synthetic peptide
  Seed: SIGKVCRTLLAKSVF
SIQKVMRRLLAKSVF

SEQ ID NO: 272340 - protein, 15 aa, Artificial Sequence
  Description of Artificial Sequence: Synthetic peptide
  Seed: SIGKVCRTLLAKSVF
SIQKVMRRLLCKSVF

SEQ ID NO: 272341 - protein, 15 aa, Artificial Sequence
  Description of Artificial Sequence: Synthetic peptide
  Seed: SIGKVCRTLLAKSVF
SIQKVMRRLLDKSVF

SEQ ID NO: 272342 - protein, 15 aa, Artificial Sequence
  Description of Artificial Sequence: Synthetic peptide
  Seed: SIGKVCRTLLAKSVF
SIQKVMRRLLEKSVF

SEQ ID NO: 272343 - protein, 15 aa, Artificial Sequence
  Description of Artificial Sequence: Synthetic peptide
  Seed: SIGKVCRTLLAKSVF
SIQKVMRRLLGKSVF

SEQ ID NO: 272344 - protein, 15 aa, Artificial Sequence
  Description of Artificial Sequence: Synthetic peptide
  Seed: SIGKVCRTLLAKSVF
SIQKVMRRLLHKSVF

SEQ ID NO: 272345 - protein, 15 aa, Artificial Sequence
  Description of Artificial Sequence: Synthetic peptide
  Seed: SIGKVCRTLLAKSVF
SIQKVMRRLLIKSVF

SEQ ID NO: 272346 - protein, 15 aa, Artificial Sequence
  Description of Artificial Sequence: Synthetic peptide
  Seed: SIGKVCRTLLAKSVF
SIQKVMRRLLLKSVF

SEQ ID NO: 272347 - protein, 15 aa, Artificial Sequence
  Description of Artificial Sequence: Synthetic peptide
  Seed: SIGKVCRTLLAKSVF
SIQKVMRRLLMKSVF

SEQ ID NO: 272348 - protein, 15 aa, Artificial Sequence
  Description of Artificial Sequence: Synthetic peptide
  Seed: SIGKVCRTLLAKSVF
SIQKVMRRLLNKSVF

SEQ ID NO: 272349 - protein, 15 aa, Artificial Sequence
  Description of Artificial Sequence: Synthetic peptide
  Seed: SIGKVCRTLLAKSVF
SIQKVMRRLLPKSVF

SEQ ID NO: 272350 - protein, 15 aa, Artificial Sequence
  Description of Artificial Sequence: Synthetic peptide
  Seed: SIGKVCRTLLAKSVF
SIQKVMRRLLQKSVF

SEQ ID NO: 272351 - protein, 15 aa, Artificial Sequence
  Description of Artificial Sequence: Synthetic peptide
  Seed: SIGKVCRTLLAKSVF
SIQKVMRRLLSKSVF

SEQ ID NO: 272352 - protein, 15 aa, Artificial Sequence
  Description of Artificial Sequence: Synthetic peptide
  Seed: SIGKVCRTLLAKSVF
SIQKVMRRLLTKSVF

SEQ ID NO: 272353 - protein, 15 aa, Artificial Sequence
  Description of Artificial Sequence: Synthetic peptide
  Seed: SIGKVCRTLLAKSVF
SIQKVMRRLLVKSVF

SEQ ID NO: 272354 - protein, 15 aa, Artificial Sequence
  Description of Artificial Sequence: Synthetic peptide
  Seed: SIGKVCRTLLAKSVF
SIQKVMRRLLYKSVF

SEQ ID NO: 272355 - protein, 15 aa, Artificial Sequence
  Description of Artificial Sequence: Synthetic peptide
  Seed: SIGKVCRTLLAKSVF
SIQKVMRSLLAKSVF

SEQ ID NO: 272356 - protein, 15 aa, Artificial Sequence
  Description of Artificial Sequence: Synthetic peptide
  Seed: SIGKVCRTLLAKSVF
SIQKVMRSLLGKSVF

SEQ ID NO: 272357 - protein, 15 aa, Artificial Sequence
  Description of Artificial Sequence: Synthetic peptide
  Seed: SIGKVCRTLLAKSVF
SIQKVMRSLLQKSVF

SEQ ID NO: 272358 - protein, 15 aa, Artificial Sequence
  Description of Artificial Sequence: Synthetic peptide
  Seed: SIGKVCRTLLAKSVF
SIQKVMRSLLSKSVF

SEQ ID NO: 272359 - protein, 15 aa, Artificial Sequence
  Description of Artificial Sequence: Synthetic peptide
  Seed: SIGKVCRTLLAKSVF
SIQKVMRTLLAKSVF

SEQ ID NO: 272360 - protein, 15 aa, Artificial Sequence
  Description of Artificial Sequence: Synthetic peptide
  Seed: SIGKVCRTLLAKSVF
SIQKVMRTLLSKSVF

SEQ ID NO: 272361 - protein, 15 aa, Artificial Sequence
  Description of Artificial Sequence: Synthetic peptide
  Seed: SIGKVCRTLLAKSVF
SIQKVQRKLLAKSVF

SEQ ID NO: 272362 - protein, 15 aa, Artificial Sequence
  Description of Artificial Sequence: Synthetic peptide
  Seed: SIGKVCRTLLAKSVF
SIQKVQRKLLGKSVF

SEQ ID NO: 272363 - protein, 15 aa, Artificial Sequence
  Description of Artificial Sequence: Synthetic peptide
  Seed: SIGKVCRTLLAKSVF
SIQKVQRKLLQKSVF

SEQ ID NO: 272364 - protein, 15 aa, Artificial Sequence
  Description of Artificial Sequence: Synthetic peptide
  Seed: SIGKVCRTLLAKSVF
SIQKVQRKLLSKSVF

SEQ ID NO: 272365 - protein, 15 aa, Artificial Sequence
  Description of Artificial Sequence: Synthetic peptide
  Seed: SIGKVCRTLLAKSVF
SIQKVQRRLLAKSVF

SEQ ID NO: 272366 - protein, 15 aa, Artificial Sequence
  Description of Artificial Sequence: Synthetic peptide
  Seed: SIGKVCRTLLAKSVF
SIQKVQRRLLGKSVF

SEQ ID NO: 272367 - protein, 15 aa, Artificial Sequence
  Description of Artificial Sequence: Synthetic peptide
  Seed: SIGKVCRTLLAKSVF
SIQKVQRRLLQKSVF

SEQ ID NO: 272368 - protein, 15 aa, Artificial Sequence
  Description of Artificial Sequence: Synthetic peptide
  Seed: SIGKVCRTLLAKSVF
SIQKVQRRLLSKSVF

SEQ ID NO: 272369 - protein, 15 aa, Artificial Sequence
  Description of Artificial Sequence: Synthetic peptide
  Seed: SIGKVCRTLLAKSVF
SIQKVVRKLLAKSVF

SEQ ID NO: 272370 - protein, 15 aa, Artificial Sequence
  Description of Artificial Sequence: Synthetic peptide
  Seed: SIGKVCRTLLAKSVF
SIQKVVRKLLGKSVF

SEQ ID NO: 272371 - protein, 15 aa, Artificial Sequence
  Description of Artificial Sequence: Synthetic peptide
  Seed: SIGKVCRTLLAKSVF
SIQKVVRKLLQKSVF

SEQ ID NO: 272372 - protein, 15 aa, Artificial Sequence
  Description of Artificial Sequence: Synthetic peptide
  Seed: SIGKVCRTLLAKSVF
SIQKVVRKLLSKSVF

SEQ ID NO: 272373 - protein, 15 aa, Artificial Sequence
  Description of Artificial Sequence: Synthetic peptide
  Seed: SIGKVCRTLLAKSVF
SIQKVVRRLLAKSVF

SEQ ID NO: 272374 - protein, 15 aa, Artificial Sequence
  Description of Artificial Sequence: Synthetic peptide
  Seed: SIGKVCRTLLAKSVF
SIQKVVRRLLCKSVF

SEQ ID NO: 272375 - protein, 15 aa, Artificial Sequence
  Description of Artificial Sequence: Synthetic peptide
  Seed: SIGKVCRTLLAKSVF
SIQKVVRRLLGKSVF

SEQ ID NO: 272376 - protein, 15 aa, Artificial Sequence
  Description of Artificial Sequence: Synthetic peptide
  Seed: SIGKVCRTLLAKSVF
SIQKVVRRLLQKSVF

SEQ ID NO: 272377 - protein, 15 aa, Artificial Sequence
  Description of Artificial Sequence: Synthetic peptide
  Seed: SIGKVCRTLLAKSVF
SIQKVVRRLLSKSVF

SEQ ID NO: 272378 - protein, 15 aa, Artificial Sequence
  Description of Artificial Sequence: Synthetic peptide
  Seed: SIGKVCRTLLAKSVF
SIQKVWRKLLAKSVF

SEQ ID NO: 272379 - protein, 15 aa, Artificial Sequence
  Description of Artificial Sequence: Synthetic peptide
  Seed: SIGKVCRTLLAKSVF
SIQKVWRKLLGKSVF

SEQ ID NO: 272380 - protein, 15 aa, Artificial Sequence
  Description of Artificial Sequence: Synthetic peptide
  Seed: SIGKVCRTLLAKSVF
SIQKVWRKLLQKSVF

SEQ ID NO: 272381 - protein, 15 aa, Artificial Sequence
  Description of Artificial Sequence: Synthetic peptide
  Seed: SIGKVCRTLLAKSVF
SIQKVWRKLLSKSVF

SEQ ID NO: 272382 - protein, 15 aa, Artificial Sequence
  Description of Artificial Sequence: Synthetic peptide
  Seed: SIGKVCRTLLAKSVF
SIQKVWRKLLVKSVF

SEQ ID NO: 272383 - protein, 15 aa, Artificial Sequence
  Description of Artificial Sequence: Synthetic peptide
  Seed: SIGKVCRTLLAKSVF
SIQKVWRRLLAKSVF

SEQ ID NO: 272384 - protein, 15 aa, Artificial Sequence
  Description of Artificial Sequence: Synthetic peptide
  Seed: SIGKVCRTLLAKSVF
SIQKVWRRLLGKSVF

SEQ ID NO: 272385 - protein, 15 aa, Artificial Sequence
  Description of Artificial Sequence: Synthetic peptide
  Seed: SIGKVCRTLLAKSVF
SIQKVWRRLLQKSVF

SEQ ID NO: 272386 - protein, 15 aa, Artificial Sequence
  Description of Artificial Sequence: Synthetic peptide
  Seed: SIGKVCRTLLAKSVF
SIQKVWRRLLSKSVF

SEQ ID NO: 272387 - protein, 15 aa, Artificial Sequence
  Description of Artificial Sequence: Synthetic peptide
  Seed: SIGKVCRTLLAKSVF
SIQKVYRKLLAKSVF

SEQ ID NO: 272388 - protein, 15 aa, Artificial Sequence
  Description of Artificial Sequence: Synthetic peptide
  Seed: SIGKVCRTLLAKSVF
SIQKVYRKLLGKSVF

SEQ ID NO: 272389 - protein, 15 aa, Artificial Sequence
  Description of Artificial Sequence: Synthetic peptide
  Seed: SIGKVCRTLLAKSVF
SIQKVYRKLLSKSVF

SEQ ID NO: 272390 - protein, 15 aa, Artificial Sequence
  Description of Artificial Sequence: Synthetic peptide
  Seed: SIGKVCRTLLAKSVF
SIQKVYRRLLAKSVF

SEQ ID NO: 272391 - protein, 15 aa, Artificial Sequence
  Description of Artificial Sequence: Synthetic peptide
  Seed: SIGKVCRTLLAKSVF
SIQKVYRRLLGKSVF

SEQ ID NO: 272392 - protein, 15 aa, Artificial Sequence
  Description of Artificial Sequence: Synthetic peptide
  Seed: SIGKVCRTLLAKSVF
SIRKVIRKLLAKSVF

SEQ ID NO: 272393 - protein, 15 aa, Artificial Sequence
  Description of Artificial Sequence: Synthetic peptide
  Seed: SIGKVCRTLLAKSVF
SIRKVIRRLLGKSVF

SEQ ID NO: 272394 - protein, 15 aa, Artificial Sequence
  Description of Artificial Sequence: Synthetic peptide
  Seed: SIGKVCRTLLAKSVF
SIRKVLRKLLAKSVF

SEQ ID NO: 272395 - protein, 15 aa, Artificial Sequence
  Description of Artificial Sequence: Synthetic peptide
  Seed: SIGKVCRTLLAKSVF
SIRKVLRKLLSKSVF

SEQ ID NO: 272396 - protein, 15 aa, Artificial Sequence
  Description of Artificial Sequence: Synthetic peptide
  Seed: SIGKVCRTLLAKSVF
SIRKVLRRLLAKSVF

SEQ ID NO: 272397 - protein, 15 aa, Artificial Sequence
  Description of Artificial Sequence: Synthetic peptide
  Seed: SIGKVCRTLLAKSVF
SIRKVLRRLLGKSVF

SEQ ID NO: 272398 - protein, 15 aa, Artificial Sequence
  Description of Artificial Sequence: Synthetic peptide
  Seed: SIGKVCRTLLAKSVF
SIRKVLRRLLSKSVF

SEQ ID NO: 272399 - protein, 15 aa, Artificial Sequence
  Description of Artificial Sequence: Synthetic peptide
  Seed: SIGKVCRTLLAKSVF
SIRKVMRKLLAKSVF

SEQ ID NO: 272400 - protein, 15 aa, Artificial Sequence
  Description of Artificial Sequence: Synthetic peptide
  Seed: SIGKVCRTLLAKSVF
SIRKVMRKLLGKSVF

SEQ ID NO: 272401 - protein, 15 aa, Artificial Sequence
  Description of Artificial Sequence: Synthetic peptide
  Seed: SIGKVCRTLLAKSVF
SIRKVMRKLLSKSVF

SEQ ID NO: 272402 - protein, 15 aa, Artificial Sequence
  Description of Artificial Sequence: Synthetic peptide
  Seed: SIGKVCRTLLAKSVF
SIRKVMRKLLVKSVF

SEQ ID NO: 272403 - protein, 15 aa, Artificial Sequence
  Description of Artificial Sequence: Synthetic peptide
  Seed: SIGKVCRTLLAKSVF
SIRKVMRRLLAKSVF

SEQ ID NO: 272404 - protein, 15 aa, Artificial Sequence
  Description of Artificial Sequence: Synthetic peptide
  Seed: SIGKVCRTLLAKSVF
SIRKVMRRLLGKSVF

SEQ ID NO: 272405 - protein, 15 aa, Artificial Sequence
  Description of Artificial Sequence: Synthetic peptide
  Seed: SIGKVCRTLLAKSVF
SIRKVMRRLLQKSVF

SEQ ID NO: 272406 - protein, 15 aa, Artificial Sequence
  Description of Artificial Sequence: Synthetic peptide
  Seed: SIGKVCRTLLAKSVF
SIRKVMRRLLSKSVF

SEQ ID NO: 272407 - protein, 15 aa, Artificial Sequence
  Description of Artificial Sequence: Synthetic peptide
  Seed: SIGKVCRTLLAKSVF
SISKVARRLLGKSVF

SEQ ID NO: 272408 - protein, 15 aa, Artificial Sequence
  Description of Artificial Sequence: Synthetic peptide
  Seed: SIGKVCRTLLAKSVF
SISKVCRRLLAKSVF

SEQ ID NO: 272409 - protein, 15 aa, Artificial Sequence
  Description of Artificial Sequence: Synthetic peptide
  Seed: SIGKVCRTLLAKSVF
SISKVCRRLLSKSVF

SEQ ID NO: 272410 - protein, 15 aa, Artificial Sequence
  Description of Artificial Sequence: Synthetic peptide
  Seed: SIGKVCRTLLAKSVF
SISKVFRKLLAKSVF

SEQ ID NO: 272411 - protein, 15 aa, Artificial Sequence
  Description of Artificial Sequence: Synthetic peptide
  Seed: SIGKVCRTLLAKSVF
SISKVFRKLLGKSVF

SEQ ID NO: 272412 - protein, 15 aa, Artificial Sequence
  Description of Artificial Sequence: Synthetic peptide
  Seed: SIGKVCRTLLAKSVF
SISKVFRKLLQKSVF

SEQ ID NO: 272413 - protein, 15 aa, Artificial Sequence
  Description of Artificial Sequence: Synthetic peptide
  Seed: SIGKVCRTLLAKSVF
SISKVFRKLLSKSVF

SEQ ID NO: 272414 - protein, 15 aa, Artificial Sequence
  Description of Artificial Sequence: Synthetic peptide
  Seed: SIGKVCRTLLAKSVF
SISKVFRRLLAKSVF

SEQ ID NO: 272415 - protein, 15 aa, Artificial Sequence
  Description of Artificial Sequence: Synthetic peptide
  Seed: SIGKVCRTLLAKSVF
SISKVFRRLLGKSVF

SEQ ID NO: 272416 - protein, 15 aa, Artificial Sequence
  Description of Artificial Sequence: Synthetic peptide
  Seed: SIGKVCRTLLAKSVF
SISKVFRRLLQKSVF

SEQ ID NO: 272417 - protein, 15 aa, Artificial Sequence
  Description of Artificial Sequence: Synthetic peptide
  Seed: SIGKVCRTLLAKSVF
SISKVFRRLLSKSVF

SEQ ID NO: 272418 - protein, 15 aa, Artificial Sequence
  Description of Artificial Sequence: Synthetic peptide
  Seed: SIGKVCRTLLAKSVF
SISKVIRKLLAKSVF

SEQ ID NO: 272419 - protein, 15 aa, Artificial Sequence
  Description of Artificial Sequence: Synthetic peptide
  Seed: SIGKVCRTLLAKSVF
SISKVIRKLLGKSVF

SEQ ID NO: 272420 - protein, 15 aa, Artificial Sequence
  Description of Artificial Sequence: Synthetic peptide
  Seed: SIGKVCRTLLAKSVF
SISKVIRKLLQKSVF

SEQ ID NO: 272421 - protein, 15 aa, Artificial Sequence
  Description of Artificial Sequence: Synthetic peptide
  Seed: SIGKVCRTLLAKSVF
SISKVIRKLLSKSVF

SEQ ID NO: 272422 - protein, 15 aa, Artificial Sequence
  Description of Artificial Sequence: Synthetic peptide
  Seed: SIGKVCRTLLAKSVF
SISKVIRRLLAKSVF

SEQ ID NO: 272423 - protein, 15 aa, Artificial Sequence
  Description of Artificial Sequence: Synthetic peptide
  Seed: SIGKVCRTLLAKSVF
SISKVIRRLLCKSVF

SEQ ID NO: 272424 - protein, 15 aa, Artificial Sequence
  Description of Artificial Sequence: Synthetic peptide
  Seed: SIGKVCRTLLAKSVF
SISKVIRRLLGKSVF

SEQ ID NO: 272425 - protein, 15 aa, Artificial Sequence
  Description of Artificial Sequence: Synthetic peptide
  Seed: SIGKVCRTLLAKSVF
SISKVIRRLLQKSVF

SEQ ID NO: 272426 - protein, 15 aa, Artificial Sequence
  Description of Artificial Sequence: Synthetic peptide
  Seed: SIGKVCRTLLAKSVF
SISKVIRRLLSKSVF

SEQ ID NO: 272427 - protein, 15 aa, Artificial Sequence
  Description of Artificial Sequence: Synthetic peptide
  Seed: SIGKVCRTLLAKSVF
SISKVLRKLLAKSVF

SEQ ID NO: 272428 - protein, 15 aa, Artificial Sequence
  Description of Artificial Sequence: Synthetic peptide
  Seed: SIGKVCRTLLAKSVF
SISKVLRKLLGKSVF

SEQ ID NO: 272429 - protein, 15 aa, Artificial Sequence
  Description of Artificial Sequence: Synthetic peptide
  Seed: SIGKVCRTLLAKSVF
SISKVLRKLLMKSVF

SEQ ID NO: 272430 - protein, 15 aa, Artificial Sequence
  Description of Artificial Sequence: Synthetic peptide
  Seed: SIGKVCRTLLAKSVF
SISKVLRKLLNKSVF

SEQ ID NO: 272431 - protein, 15 aa, Artificial Sequence
  Description of Artificial Sequence: Synthetic peptide
  Seed: SIGKVCRTLLAKSVF
SISKVLRKLLQKSVF

SEQ ID NO: 272432 - protein, 15 aa, Artificial Sequence
  Description of Artificial Sequence: Synthetic peptide
  Seed: SIGKVCRTLLAKSVF
SISKVLRKLLSKSVF

SEQ ID NO: 272433 - protein, 15 aa, Artificial Sequence
  Description of Artificial Sequence: Synthetic peptide
  Seed: SIGKVCRTLLAKSVF
SISKVLRKLLVKSVF

SEQ ID NO: 272434 - protein, 15 aa, Artificial Sequence
  Description of Artificial Sequence: Synthetic peptide
  Seed: SIGKVCRTLLAKSVF
SISKVLRRLLAKSVF

SEQ ID NO: 272435 - protein, 15 aa, Artificial Sequence
  Description of Artificial Sequence: Synthetic peptide
  Seed: SIGKVCRTLLAKSVF
SISKVLRRLLCKSVF

SEQ ID NO: 272436 - protein, 15 aa, Artificial Sequence
  Description of Artificial Sequence: Synthetic peptide
  Seed: SIGKVCRTLLAKSVF
SISKVLRRLLEKSVF

SEQ ID NO: 272437 - protein, 15 aa, Artificial Sequence
  Description of Artificial Sequence: Synthetic peptide
  Seed: SIGKVCRTLLAKSVF
SISKVLRRLLGKSVF

SEQ ID NO: 272438 - protein, 15 aa, Artificial Sequence
  Description of Artificial Sequence: Synthetic peptide
  Seed: SIGKVCRTLLAKSVF
SISKVLRRLLQKSVF

SEQ ID NO: 272439 - protein, 15 aa, Artificial Sequence
  Description of Artificial Sequence: Synthetic peptide
  Seed: SIGKVCRTLLAKSVF
SISKVLRRLLSKSVF

SEQ ID NO: 272440 - protein, 15 aa, Artificial Sequence
  Description of Artificial Sequence: Synthetic peptide
  Seed: SIGKVCRTLLAKSVF
SISKVLRRLLVKSVF

SEQ ID NO: 272441 - protein, 15 aa, Artificial Sequence
  Description of Artificial Sequence: Synthetic peptide
  Seed: SIGKVCRTLLAKSVF
SISKVMRKLLAKSVF

SEQ ID NO: 272442 - protein, 15 aa, Artificial Sequence
  Description of Artificial Sequence: Synthetic peptide
  Seed: SIGKVCRTLLAKSVF
SISKVMRKLLEKSVF

SEQ ID NO: 272443 - protein, 15 aa, Artificial Sequence
  Description of Artificial Sequence: Synthetic peptide
  Seed: SIGKVCRTLLAKSVF
SISKVMRKLLGKSVF

SEQ ID NO: 272444 - protein, 15 aa, Artificial Sequence
  Description of Artificial Sequence: Synthetic peptide
  Seed: SIGKVCRTLLAKSVF
SISKVMRKLLHKSVF

SEQ ID NO: 272445 - protein, 15 aa, Artificial Sequence
  Description of Artificial Sequence: Synthetic peptide
  Seed: SIGKVCRTLLAKSVF
SISKVMRKLLIKSVF

SEQ ID NO: 272446 - protein, 15 aa, Artificial Sequence
  Description of Artificial Sequence: Synthetic peptide
  Seed: SIGKVCRTLLAKSVF
SISKVMRKLLLKSVF

SEQ ID NO: 272447 - protein, 15 aa, Artificial Sequence
  Description of Artificial Sequence: Synthetic peptide
  Seed: SIGKVCRTLLAKSVF
SISKVMRKLLMKSVF

SEQ ID NO: 272448 - protein, 15 aa, Artificial Sequence
  Description of Artificial Sequence: Synthetic peptide
  Seed: SIGKVCRTLLAKSVF
SISKVMRKLLNKSVF

SEQ ID NO: 272449 - protein, 15 aa, Artificial Sequence
  Description of Artificial Sequence: Synthetic peptide
  Seed: SIGKVCRTLLAKSVF
SISKVMRKLLQKSVF

SEQ ID NO: 272450 - protein, 15 aa, Artificial Sequence
  Description of Artificial Sequence: Synthetic peptide
  Seed: SIGKVCRTLLAKSVF
SISKVMRKLLSKSVF

SEQ ID NO: 272451 - protein, 15 aa, Artificial Sequence
  Description of Artificial Sequence: Synthetic peptide
  Seed: SIGKVCRTLLAKSVF
SISKVMRKLLTKSVF

SEQ ID NO: 272452 - protein, 15 aa, Artificial Sequence
  Description of Artificial Sequence: Synthetic peptide
  Seed: SIGKVCRTLLAKSVF
SISKVMRKLLVKSVF

SEQ ID NO: 272453 - protein, 15 aa, Artificial Sequence
  Description of Artificial Sequence: Synthetic peptide
  Seed: SIGKVCRTLLAKSVF
SISKVMRKLLYKSVF

SEQ ID NO: 272454 - protein, 15 aa, Artificial Sequence
  Description of Artificial Sequence: Synthetic peptide
  Seed: SIGKVCRTLLAKSVF
SISKVMRRLLAKSVF

SEQ ID NO: 272455 - protein, 15 aa, Artificial Sequence
  Description of Artificial Sequence: Synthetic peptide
  Seed: SIGKVCRTLLAKSVF
SISKVMRRLLCKSVF

SEQ ID NO: 272456 - protein, 15 aa, Artificial Sequence
  Description of Artificial Sequence: Synthetic peptide
  Seed: SIGKVCRTLLAKSVF
SISKVMRRLLDKSVF

SEQ ID NO: 272457 - protein, 15 aa, Artificial Sequence
  Description of Artificial Sequence: Synthetic peptide
  Seed: SIGKVCRTLLAKSVF
SISKVMRRLLEKSVF

SEQ ID NO: 272458 - protein, 15 aa, Artificial Sequence
  Description of Artificial Sequence: Synthetic peptide
  Seed: SIGKVCRTLLAKSVF
SISKVMRRLLGKSVF

SEQ ID NO: 272459 - protein, 15 aa, Artificial Sequence
  Description of Artificial Sequence: Synthetic peptide
  Seed: SIGKVCRTLLAKSVF
SISKVMRRLLHKSVF

SEQ ID NO: 272460 - protein, 15 aa, Artificial Sequence
  Description of Artificial Sequence: Synthetic peptide
  Seed: SIGKVCRTLLAKSVF
SISKVMRRLLIKSVF

SEQ ID NO: 272461 - protein, 15 aa, Artificial Sequence
  Description of Artificial Sequence: Synthetic peptide
  Seed: SIGKVCRTLLAKSVF
SISKVMRRLLLKSVF

SEQ ID NO: 272462 - protein, 15 aa, Artificial Sequence
  Description of Artificial Sequence: Synthetic peptide
  Seed: SIGKVCRTLLAKSVF
SISKVMRRLLMKSVF

SEQ ID NO: 272463 - protein, 15 aa, Artificial Sequence
  Description of Artificial Sequence: Synthetic peptide
  Seed: SIGKVCRTLLAKSVF
SISKVMRRLLNKSVF

SEQ ID NO: 272464 - protein, 15 aa, Artificial Sequence
  Description of Artificial Sequence: Synthetic peptide
  Seed: SIGKVCRTLLAKSVF
SISKVMRRLLQKSVF

SEQ ID NO: 272465 - protein, 15 aa, Artificial Sequence
  Description of Artificial Sequence: Synthetic peptide
  Seed: SIGKVCRTLLAKSVF
SISKVMRRLLSKSVF

SEQ ID NO: 272466 - protein, 15 aa, Artificial Sequence
  Description of Artificial Sequence: Synthetic peptide
  Seed: SIGKVCRTLLAKSVF
SISKVMRRLLTKSVF

SEQ ID NO: 272467 - protein, 15 aa, Artificial Sequence
  Description of Artificial Sequence: Synthetic peptide
  Seed: SIGKVCRTLLAKSVF
SISKVMRRLLVKSVF

SEQ ID NO: 272468 - protein, 15 aa, Artificial Sequence
  Description of Artificial Sequence: Synthetic peptide
  Seed: SIGKVCRTLLAKSVF
SISKVQRKLLAKSVF

SEQ ID NO: 272469 - protein, 15 aa, Artificial Sequence
  Description of Artificial Sequence: Synthetic peptide
  Seed: SIGKVCRTLLAKSVF
SISKVQRRLLAKSVF

SEQ ID NO: 272470 - protein, 15 aa, Artificial Sequence
  Description of Artificial Sequence: Synthetic peptide
  Seed: SIGKVCRTLLAKSVF
SISKVQRRLLGKSVF

SEQ ID NO: 272471 - protein, 15 aa, Artificial Sequence
  Description of Artificial Sequence: Synthetic peptide
  Seed: SIGKVCRTLLAKSVF
SISKVVRKLLAKSVF

SEQ ID NO: 272472 - protein, 15 aa, Artificial Sequence
  Description of Artificial Sequence: Synthetic peptide
  Seed: SIGKVCRTLLAKSVF
SISKVVRKLLGKSVF

SEQ ID NO: 272473 - protein, 15 aa, Artificial Sequence
  Description of Artificial Sequence: Synthetic peptide
  Seed: SIGKVCRTLLAKSVF
SISKVVRKLLQKSVF

SEQ ID NO: 272474 - protein, 15 aa, Artificial Sequence
  Description of Artificial Sequence: Synthetic peptide
  Seed: SIGKVCRTLLAKSVF
SISKVVRKLLSKSVF

SEQ ID NO: 272475 - protein, 15 aa, Artificial Sequence
  Description of Artificial Sequence: Synthetic peptide
  Seed: SIGKVCRTLLAKSVF
SISKVVRRLLAKSVF

SEQ ID NO: 272476 - protein, 15 aa, Artificial Sequence
  Description of Artificial Sequence: Synthetic peptide
  Seed: SIGKVCRTLLAKSVF
SISKVVRRLLGKSVF

SEQ ID NO: 272477 - protein, 15 aa, Artificial Sequence
  Description of Artificial Sequence: Synthetic peptide
  Seed: SIGKVCRTLLAKSVF
SISKVVRRLLQKSVF

SEQ ID NO: 272478 - protein, 15 aa, Artificial Sequence
  Description of Artificial Sequence: Synthetic peptide
  Seed: SIGKVCRTLLAKSVF
SISKVVRRLLSKSVF

SEQ ID NO: 272479 - protein, 15 aa, Artificial Sequence
  Description of Artificial Sequence: Synthetic peptide
  Seed: SIGKVCRTLLAKSVF
SISKVWRKLLAKSVF

SEQ ID NO: 272480 - protein, 15 aa, Artificial Sequence
  Description of Artificial Sequence: Synthetic peptide
  Seed: SIGKVCRTLLAKSVF
SISKVWRKLLSKSVF

SEQ ID NO: 272481 - protein, 15 aa, Artificial Sequence
  Description of Artificial Sequence: Synthetic peptide
  Seed: SIGKVCRTLLAKSVF
SISKVWRRLLAKSVF

SEQ ID NO: 272482 - protein, 15 aa, Artificial Sequence
  Description of Artificial Sequence: Synthetic peptide
  Seed: SIGKVCRTLLAKSVF
SISKVWRRLLGKSVF

SEQ ID NO: 272483 - protein, 15 aa, Artificial Sequence
  Description of Artificial Sequence: Synthetic peptide
  Seed: SIGKVCRTLLAKSVF
SISKVYRKLLAKSVF

SEQ ID NO: 272484 - protein, 15 aa, Artificial Sequence
  Description of Artificial Sequence: Synthetic peptide
  Seed: SIGKVCRTLLAKSVF
SISKVYRRLLAKSVF

SEQ ID NO: 272485 - protein, 15 aa, Artificial Sequence
  Description of Artificial Sequence: Synthetic peptide
  Seed: SIGKVCRTLLAKSVF
SITKVARKLLAKSVF

SEQ ID NO: 272486 - protein, 15 aa, Artificial Sequence
  Description of Artificial Sequence: Synthetic peptide
  Seed: SIGKVCRTLLAKSVF
SITKVARKLLGKSVF

SEQ ID NO: 272487 - protein, 15 aa, Artificial Sequence
  Description of Artificial Sequence: Synthetic peptide
  Seed: SIGKVCRTLLAKSVF
SITKVARKLLQKSVF

SEQ ID NO: 272488 - protein, 15 aa, Artificial Sequence
  Description of Artificial Sequence: Synthetic peptide
  Seed: SIGKVCRTLLAKSVF
SITKVARKLLSKSVF

SEQ ID NO: 272489 - protein, 15 aa, Artificial Sequence
  Description of Artificial Sequence: Synthetic peptide
  Seed: SIGKVCRTLLAKSVF
SITKVARRLLAKSVF

SEQ ID NO: 272490 - protein, 15 aa, Artificial Sequence
  Description of Artificial Sequence: Synthetic peptide
  Seed: SIGKVCRTLLAKSVF
SITKVARRLLGKSVF

SEQ ID NO: 272491 - protein, 15 aa, Artificial Sequence
  Description of Artificial Sequence: Synthetic peptide
  Seed: SIGKVCRTLLAKSVF
SITKVARRLLQKSVF

SEQ ID NO: 272492 - protein, 15 aa, Artificial Sequence
  Description of Artificial Sequence: Synthetic peptide
  Seed: SIGKVCRTLLAKSVF
SITKVARRLLSKSVF

SEQ ID NO: 272493 - protein, 15 aa, Artificial Sequence
  Description of Artificial Sequence: Synthetic peptide
  Seed: SIGKVCRTLLAKSVF
SITKVCRKLLAKSVF

SEQ ID NO: 272494 - protein, 15 aa, Artificial Sequence
  Description of Artificial Sequence: Synthetic peptide
  Seed: SIGKVCRTLLAKSVF
SITKVCRKLLSKSVF

SEQ ID NO: 272495 - protein, 15 aa, Artificial Sequence
  Description of Artificial Sequence: Synthetic peptide
  Seed: SIGKVCRTLLAKSVF
SITKVCRRLLAKSVF

SEQ ID NO: 272496 - protein, 15 aa, Artificial Sequence
  Description of Artificial Sequence: Synthetic peptide
  Seed: SIGKVCRTLLAKSVF
SITKVCRRLLGKSVF

SEQ ID NO: 272497 - protein, 15 aa, Artificial Sequence
  Description of Artificial Sequence: Synthetic peptide
  Seed: SIGKVCRTLLAKSVF
SITKVCRRLLQKSVF

SEQ ID NO: 272498 - protein, 15 aa, Artificial Sequence
  Description of Artificial Sequence: Synthetic peptide
  Seed: SIGKVCRTLLAKSVF
SITKVCRRLLSKSVF

SEQ ID NO: 272499 - protein, 15 aa, Artificial Sequence
  Description of Artificial Sequence: Synthetic peptide
  Seed: SIGKVCRTLLAKSVF
SITKVCRRLLTKSVF

SEQ ID NO: 272500 - protein, 15 aa, Artificial Sequence
  Description of Artificial Sequence: Synthetic peptide
  Seed: SIGKVCRTLLAKSVF
SITKVCRRLLVKSVF

SEQ ID NO: 272501 - protein, 15 aa, Artificial Sequence
  Description of Artificial Sequence: Synthetic peptide
  Seed: SIGKVCRTLLAKSVF
SITKVERRLLAKSVF

SEQ ID NO: 272502 - protein, 15 aa, Artificial Sequence
  Description of Artificial Sequence: Synthetic peptide
  Seed: SIGKVCRTLLAKSVF
SITKVERRLLQKSVF

SEQ ID NO: 272503 - protein, 15 aa, Artificial Sequence
  Description of Artificial Sequence: Synthetic peptide
  Seed: SIGKVCRTLLAKSVF
SITKVERRLLSKSVF

SEQ ID NO: 272504 - protein, 15 aa, Artificial Sequence
  Description of Artificial Sequence: Synthetic peptide
  Seed: SIGKVCRTLLAKSVF
SITKVFRKLLAKSVF

SEQ ID NO: 272505 - protein, 15 aa, Artificial Sequence
  Description of Artificial Sequence: Synthetic peptide
  Seed: SIGKVCRTLLAKSVF
SITKVFRKLLGKSVF

SEQ ID NO: 272506 - protein, 15 aa, Artificial Sequence
  Description of Artificial Sequence: Synthetic peptide
  Seed: SIGKVCRTLLAKSVF
SITKVFRKLLHKSVF

SEQ ID NO: 272507 - protein, 15 aa, Artificial Sequence
  Description of Artificial Sequence: Synthetic peptide
  Seed: SIGKVCRTLLAKSVF
SITKVFRKLLMKSVF

SEQ ID NO: 272508 - protein, 15 aa, Artificial Sequence
  Description of Artificial Sequence: Synthetic peptide
  Seed: SIGKVCRTLLAKSVF
SITKVFRKLLQKSVF

SEQ ID NO: 272509 - protein, 15 aa, Artificial Sequence
  Description of Artificial Sequence: Synthetic peptide
  Seed: SIGKVCRTLLAKSVF
SITKVFRKLLSKSVF

SEQ ID NO: 272510 - protein, 15 aa, Artificial Sequence
  Description of Artificial Sequence: Synthetic peptide
  Seed: SIGKVCRTLLAKSVF
SITKVFRRLLAKSVF

SEQ ID NO: 272511 - protein, 15 aa, Artificial Sequence
  Description of Artificial Sequence: Synthetic peptide
  Seed: SIGKVCRTLLAKSVF
SITKVFRRLLEKSVF

SEQ ID NO: 272512 - protein, 15 aa, Artificial Sequence
  Description of Artificial Sequence: Synthetic peptide
  Seed: SIGKVCRTLLAKSVF
SITKVFRRLLGKSVF

SEQ ID NO: 272513 - protein, 15 aa, Artificial Sequence
  Description of Artificial Sequence: Synthetic peptide
  Seed: SIGKVCRTLLAKSVF
SITKVFRRLLMKSVF

SEQ ID NO: 272514 - protein, 15 aa, Artificial Sequence
  Description of Artificial Sequence: Synthetic peptide
  Seed: SIGKVCRTLLAKSVF
SITKVFRRLLQKSVF

SEQ ID NO: 272515 - protein, 15 aa, Artificial Sequence
  Description of Artificial Sequence: Synthetic peptide
  Seed: SIGKVCRTLLAKSVF
SITKVFRRLLSKSVF

SEQ ID NO: 272516 - protein, 15 aa, Artificial Sequence
  Description of Artificial Sequence: Synthetic peptide
  Seed: SIGKVCRTLLAKSVF
SITKVIRKLLAKSVF

SEQ ID NO: 272517 - protein, 15 aa, Artificial Sequence
  Description of Artificial Sequence: Synthetic peptide
  Seed: SIGKVCRTLLAKSVF
SITKVIRKLLCKSVF

SEQ ID NO: 272518 - protein, 15 aa, Artificial Sequence
  Description of Artificial Sequence: Synthetic peptide
  Seed: SIGKVCRTLLAKSVF
SITKVIRKLLEKSVF

SEQ ID NO: 272519 - protein, 15 aa, Artificial Sequence
  Description of Artificial Sequence: Synthetic peptide
  Seed: SIGKVCRTLLAKSVF
SITKVIRKLLGKSVF

SEQ ID NO: 272520 - protein, 15 aa, Artificial Sequence
  Description of Artificial Sequence: Synthetic peptide
  Seed: SIGKVCRTLLAKSVF
SITKVIRKLLMKSVF

SEQ ID NO: 272521 - protein, 15 aa, Artificial Sequence
  Description of Artificial Sequence: Synthetic peptide
  Seed: SIGKVCRTLLAKSVF
SITKVIRKLLNKSVF

SEQ ID NO: 272522 - protein, 15 aa, Artificial Sequence
  Description of Artificial Sequence: Synthetic peptide
  Seed: SIGKVCRTLLAKSVF
SITKVIRKLLQKSVF

SEQ ID NO: 272523 - protein, 15 aa, Artificial Sequence
  Description of Artificial Sequence: Synthetic peptide
  Seed: SIGKVCRTLLAKSVF
SITKVIRKLLSKSVF

SEQ ID NO: 272524 - protein, 15 aa, Artificial Sequence
  Description of Artificial Sequence: Synthetic peptide
  Seed: SIGKVCRTLLAKSVF
SITKVIRKLLVKSVF

SEQ ID NO: 272525 - protein, 15 aa, Artificial Sequence
  Description of Artificial Sequence: Synthetic peptide
  Seed: SIGKVCRTLLAKSVF
SITKVIRRLLAKSVF

SEQ ID NO: 272526 - protein, 15 aa, Artificial Sequence
  Description of Artificial Sequence: Synthetic peptide
  Seed: SIGKVCRTLLAKSVF
SITKVIRRLLCKSVF

SEQ ID NO: 272527 - protein, 15 aa, Artificial Sequence
  Description of Artificial Sequence: Synthetic peptide
  Seed: SIGKVCRTLLAKSVF
SITKVIRRLLDKSVF

SEQ ID NO: 272528 - protein, 15 aa, Artificial Sequence
  Description of Artificial Sequence: Synthetic peptide
  Seed: SIGKVCRTLLAKSVF
SITKVIRRLLEKSVF

SEQ ID NO: 272529 - protein, 15 aa, Artificial Sequence
  Description of Artificial Sequence: Synthetic peptide
  Seed: SIGKVCRTLLAKSVF
SITKVIRRLLGKSVF

SEQ ID NO: 272530 - protein, 15 aa, Artificial Sequence
  Description of Artificial Sequence: Synthetic peptide
  Seed: SIGKVCRTLLAKSVF
SITKVIRRLLIKSVF

SEQ ID NO: 272531 - protein, 15 aa, Artificial Sequence
  Description of Artificial Sequence: Synthetic peptide
  Seed: SIGKVCRTLLAKSVF
SITKVIRRLLLKSVF

SEQ ID NO: 272532 - protein, 15 aa, Artificial Sequence
  Description of Artificial Sequence: Synthetic peptide
  Seed: SIGKVCRTLLAKSVF
SITKVIRRLLMKSVF

SEQ ID NO: 272533 - protein, 15 aa, Artificial Sequence
  Description of Artificial Sequence: Synthetic peptide
  Seed: SIGKVCRTLLAKSVF
SITKVIRRLLNKSVF

SEQ ID NO: 272534 - protein, 15 aa, Artificial Sequence
  Description of Artificial Sequence: Synthetic peptide
  Seed: SIGKVCRTLLAKSVF
SITKVIRRLLQKSVF

SEQ ID NO: 272535 - protein, 15 aa, Artificial Sequence
  Description of Artificial Sequence: Synthetic peptide
  Seed: SIGKVCRTLLAKSVF
SITKVIRRLLSKSVF

SEQ ID NO: 272536 - protein, 15 aa, Artificial Sequence
  Description of Artificial Sequence: Synthetic peptide
  Seed: SIGKVCRTLLAKSVF
SITKVIRRLLTKSVF

SEQ ID NO: 272537 - protein, 15 aa, Artificial Sequence
  Description of Artificial Sequence: Synthetic peptide
  Seed: SIGKVCRTLLAKSVF
SITKVIRRLLVKSVF

SEQ ID NO: 272538 - protein, 15 aa, Artificial Sequence
  Description of Artificial Sequence: Synthetic peptide
  Seed: SIGKVCRTLLAKSVF
SITKVLRHLLGKSVF

SEQ ID NO: 272539 - protein, 15 aa, Artificial Sequence
  Description of Artificial Sequence: Synthetic peptide
  Seed: SIGKVCRTLLAKSVF
SITKVLRKLLAKSVF

SEQ ID NO: 272540 - protein, 15 aa, Artificial Sequence
  Description of Artificial Sequence: Synthetic peptide
  Seed: SIGKVCRTLLAKSVF
SITKVLRKLLCKSVF

SEQ ID NO: 272541 - protein, 15 aa, Artificial Sequence
  Description of Artificial Sequence: Synthetic peptide
  Seed: SIGKVCRTLLAKSVF
SITKVLRKLLDKSVF

SEQ ID NO: 272542 - protein, 15 aa, Artificial Sequence
  Description of Artificial Sequence: Synthetic peptide
  Seed: SIGKVCRTLLAKSVF
SITKVLRKLLEKSVF

SEQ ID NO: 272543 - protein, 15 aa, Artificial Sequence
  Description of Artificial Sequence: Synthetic peptide
  Seed: SIGKVCRTLLAKSVF
SITKVLRKLLGKSVF

SEQ ID NO: 272544 - protein, 15 aa, Artificial Sequence
  Description of Artificial Sequence: Synthetic peptide
  Seed: SIGKVCRTLLAKSVF
SITKVLRKLLHKSVF

SEQ ID NO: 272545 - protein, 15 aa, Artificial Sequence
  Description of Artificial Sequence: Synthetic peptide
  Seed: SIGKVCRTLLAKSVF
SITKVLRKLLIKSVF

SEQ ID NO: 272546 - protein, 15 aa, Artificial Sequence
  Description of Artificial Sequence: Synthetic peptide
  Seed: SIGKVCRTLLAKSVF
SITKVLRKLLLKSVF

SEQ ID NO: 272547 - protein, 15 aa, Artificial Sequence
  Description of Artificial Sequence: Synthetic peptide
  Seed: SIGKVCRTLLAKSVF
SITKVLRKLLMKSVF

SEQ ID NO: 272548 - protein, 15 aa, Artificial Sequence
  Description of Artificial Sequence: Synthetic peptide
  Seed: SIGKVCRTLLAKSVF
SITKVLRKLLNKSVF

SEQ ID NO: 272549 - protein, 15 aa, Artificial Sequence
  Description of Artificial Sequence: Synthetic peptide
  Seed: SIGKVCRTLLAKSVF
SITKVLRKLLQKSVF

SEQ ID NO: 272550 - protein, 15 aa, Artificial Sequence
  Description of Artificial Sequence: Synthetic peptide
  Seed: SIGKVCRTLLAKSVF
SITKVLRKLLSKSVF

SEQ ID NO: 272551 - protein, 15 aa, Artificial Sequence
  Description of Artificial Sequence: Synthetic peptide
  Seed: SIGKVCRTLLAKSVF
SITKVLRKLLTKSVF

SEQ ID NO: 272552 - protein, 15 aa, Artificial Sequence
  Description of Artificial Sequence: Synthetic peptide
  Seed: SIGKVCRTLLAKSVF
SITKVLRKLLVKSVF

SEQ ID NO: 272553 - protein, 15 aa, Artificial Sequence
  Description of Artificial Sequence: Synthetic peptide
  Seed: SIGKVCRTLLAKSVF
SITKVLRKLLYKSVF

SEQ ID NO: 272554 - protein, 15 aa, Artificial Sequence
  Description of Artificial Sequence: Synthetic peptide
  Seed: SIGKVCRTLLAKSVF
SITKVLRRLLAKSVF

SEQ ID NO: 272555 - protein, 15 aa, Artificial Sequence
  Description of Artificial Sequence: Synthetic peptide
  Seed: SIGKVCRTLLAKSVF
SITKVLRRLLCKSVF

SEQ ID NO: 272556 - protein, 15 aa, Artificial Sequence
  Description of Artificial Sequence: Synthetic peptide
  Seed: SIGKVCRTLLAKSVF
SITKVLRRLLDKSVF

SEQ ID NO: 272557 - protein, 15 aa, Artificial Sequence
  Description of Artificial Sequence: Synthetic peptide
  Seed: SIGKVCRTLLAKSVF
SITKVLRRLLEKSVF

SEQ ID NO: 272558 - protein, 15 aa, Artificial Sequence
  Description of Artificial Sequence: Synthetic peptide
  Seed: SIGKVCRTLLAKSVF
SITKVLRRLLGKSVF

SEQ ID NO: 272559 - protein, 15 aa, Artificial Sequence
  Description of Artificial Sequence: Synthetic peptide
  Seed: SIGKVCRTLLAKSVF
SITKVLRRLLHKSVF

SEQ ID NO: 272560 - protein, 15 aa, Artificial Sequence
  Description of Artificial Sequence: Synthetic peptide
  Seed: SIGKVCRTLLAKSVF
SITKVLRRLLIKSVF

SEQ ID NO: 272561 - protein, 15 aa, Artificial Sequence
  Description of Artificial Sequence: Synthetic peptide
  Seed: SIGKVCRTLLAKSVF
SITKVLRRLLLKSVF

SEQ ID NO: 272562 - protein, 15 aa, Artificial Sequence
  Description of Artificial Sequence: Synthetic peptide
  Seed: SIGKVCRTLLAKSVF
SITKVLRRLLMKSVF

SEQ ID NO: 272563 - protein, 15 aa, Artificial Sequence
  Description of Artificial Sequence: Synthetic peptide
  Seed: SIGKVCRTLLAKSVF
SITKVLRRLLNKSVF

SEQ ID NO: 272564 - protein, 15 aa, Artificial Sequence
  Description of Artificial Sequence: Synthetic peptide
  Seed: SIGKVCRTLLAKSVF
SITKVLRRLLQKSVF

SEQ ID NO: 272565 - protein, 15 aa, Artificial Sequence
  Description of Artificial Sequence: Synthetic peptide
  Seed: SIGKVCRTLLAKSVF
SITKVLRRLLSKSVF

SEQ ID NO: 272566 - protein, 15 aa, Artificial Sequence
  Description of Artificial Sequence: Synthetic peptide
  Seed: SIGKVCRTLLAKSVF
SITKVLRRLLTKSVF

SEQ ID NO: 272567 - protein, 15 aa, Artificial Sequence
  Description of Artificial Sequence: Synthetic peptide
  Seed: SIGKVCRTLLAKSVF
SITKVLRRLLVKSVF

SEQ ID NO: 272568 - protein, 15 aa, Artificial Sequence
  Description of Artificial Sequence: Synthetic peptide
  Seed: SIGKVCRTLLAKSVF
SITKVLRRLLYKSVF

SEQ ID NO: 272569 - protein, 15 aa, Artificial Sequence
  Description of Artificial Sequence: Synthetic peptide
  Seed: SIGKVCRTLLAKSVF
SITKVLRTLLAKSVF

SEQ ID NO: 272570 - protein, 15 aa, Artificial Sequence
  Description of Artificial Sequence: Synthetic peptide
  Seed: SIGKVCRTLLAKSVF
SITKVLRTLLSKSVF

SEQ ID NO: 272571 - protein, 15 aa, Artificial Sequence
  Description of Artificial Sequence: Synthetic peptide
  Seed: SIGKVCRTLLAKSVF
SITKVMRHLLAKSVF

SEQ ID NO: 272572 - protein, 15 aa, Artificial Sequence
  Description of Artificial Sequence: Synthetic peptide
  Seed: SIGKVCRTLLAKSVF
SITKVMRHLLGKSVF

SEQ ID NO: 272573 - protein, 15 aa, Artificial Sequence
  Description of Artificial Sequence: Synthetic peptide
  Seed: SIGKVCRTLLAKSVF
SITKVMRHLLQKSVF

SEQ ID NO: 272574 - protein, 15 aa, Artificial Sequence
  Description of Artificial Sequence: Synthetic peptide
  Seed: SIGKVCRTLLAKSVF
SITKVMRHLLSKSVF

SEQ ID NO: 272575 - protein, 15 aa, Artificial Sequence
  Description of Artificial Sequence: Synthetic peptide
  Seed: SIGKVCRTLLAKSVF
SITKVMRKLLAKSVF

SEQ ID NO: 272576 - protein, 15 aa, Artificial Sequence
  Description of Artificial Sequence: Synthetic peptide
  Seed: SIGKVCRTLLAKSVF
SITKVMRKLLCKSVF

SEQ ID NO: 272577 - protein, 15 aa, Artificial Sequence
  Description of Artificial Sequence: Synthetic peptide
  Seed: SIGKVCRTLLAKSVF
SITKVMRKLLDKSVF

SEQ ID NO: 272578 - protein, 15 aa, Artificial Sequence
  Description of Artificial Sequence: Synthetic peptide
  Seed: SIGKVCRTLLAKSVF
SITKVMRKLLEKSVF

SEQ ID NO: 272579 - protein, 15 aa, Artificial Sequence
  Description of Artificial Sequence: Synthetic peptide
  Seed: SIGKVCRTLLAKSVF
SITKVMRKLLGKSVF

SEQ ID NO: 272580 - protein, 15 aa, Artificial Sequence
  Description of Artificial Sequence: Synthetic peptide
  Seed: SIGKVCRTLLAKSVF
SITKVMRKLLHKSVF

SEQ ID NO: 272581 - protein, 15 aa, Artificial Sequence
  Description of Artificial Sequence: Synthetic peptide
  Seed: SIGKVCRTLLAKSVF
SITKVMRKLLIKSVF

SEQ ID NO: 272582 - protein, 15 aa, Artificial Sequence
  Description of Artificial Sequence: Synthetic peptide
  Seed: SIGKVCRTLLAKSVF
SITKVMRKLLLKSVF

SEQ ID NO: 272583 - protein, 15 aa, Artificial Sequence
  Description of Artificial Sequence: Synthetic peptide
  Seed: SIGKVCRTLLAKSVF
SITKVMRKLLMKSVF

SEQ ID NO: 272584 - protein, 15 aa, Artificial Sequence
  Description of Artificial Sequence: Synthetic peptide
  Seed: SIGKVCRTLLAKSVF
SITKVMRKLLNKSVF

SEQ ID NO: 272585 - protein, 15 aa, Artificial Sequence
  Description of Artificial Sequence: Synthetic peptide
  Seed: SIGKVCRTLLAKSVF
SITKVMRKLLPKSVF

SEQ ID NO: 272586 - protein, 15 aa, Artificial Sequence
  Description of Artificial Sequence: Synthetic peptide
  Seed: SIGKVCRTLLAKSVF
SITKVMRKLLQKSVF

SEQ ID NO: 272587 - protein, 15 aa, Artificial Sequence
  Description of Artificial Sequence: Synthetic peptide
  Seed: SIGKVCRTLLAKSVF
SITKVMRKLLSKSVF

SEQ ID NO: 272588 - protein, 15 aa, Artificial Sequence
  Description of Artificial Sequence: Synthetic peptide
  Seed: SIGKVCRTLLAKSVF
SITKVMRKLLTKSVF

SEQ ID NO: 272589 - protein, 15 aa, Artificial Sequence
  Description of Artificial Sequence: Synthetic peptide
  Seed: SIGKVCRTLLAKSVF
SITKVMRKLLVKSVF

SEQ ID NO: 272590 - protein, 15 aa, Artificial Sequence
  Description of Artificial Sequence: Synthetic peptide
  Seed: SIGKVCRTLLAKSVF
SITKVMRKLLYKSVF

SEQ ID NO: 272591 - protein, 15 aa, Artificial Sequence
  Description of Artificial Sequence: Synthetic peptide
  Seed: SIGKVCRTLLAKSVF
SITKVMRRLLAKSVF

SEQ ID NO: 272592 - protein, 15 aa, Artificial Sequence
  Description of Artificial Sequence: Synthetic peptide
  Seed: SIGKVCRTLLAKSVF
SITKVMRRLLCKSVF

SEQ ID NO: 272593 - protein, 15 aa, Artificial Sequence
  Description of Artificial Sequence: Synthetic peptide
  Seed: SIGKVCRTLLAKSVF
SITKVMRRLLDKSVF

SEQ ID NO: 272594 - protein, 15 aa, Artificial Sequence
  Description of Artificial Sequence: Synthetic peptide
  Seed: SIGKVCRTLLAKSVF
SITKVMRRLLEKSVF

SEQ ID NO: 272595 - protein, 15 aa, Artificial Sequence
  Description of Artificial Sequence: Synthetic peptide
  Seed: SIGKVCRTLLAKSVF
SITKVMRRLLGKSVF

SEQ ID NO: 272596 - protein, 15 aa, Artificial Sequence
  Description of Artificial Sequence: Synthetic peptide
  Seed: SIGKVCRTLLAKSVF
SITKVMRRLLHKSVF

SEQ ID NO: 272597 - protein, 15 aa, Artificial Sequence
  Description of Artificial Sequence: Synthetic peptide
  Seed: SIGKVCRTLLAKSVF
SITKVMRRLLIKSVF

SEQ ID NO: 272598 - protein, 15 aa, Artificial Sequence
  Description of Artificial Sequence: Synthetic peptide
  Seed: SIGKVCRTLLAKSVF
SITKVMRRLLLKSVF

SEQ ID NO: 272599 - protein, 15 aa, Artificial Sequence
  Description of Artificial Sequence: Synthetic peptide
  Seed: SIGKVCRTLLAKSVF
SITKVMRRLLMKSVF

SEQ ID NO: 272600 - protein, 15 aa, Artificial Sequence
  Description of Artificial Sequence: Synthetic peptide
  Seed: SIGKVCRTLLAKSVF
SITKVMRRLLNKSVF

SEQ ID NO: 272601 - protein, 15 aa, Artificial Sequence
  Description of Artificial Sequence: Synthetic peptide
  Seed: SIGKVCRTLLAKSVF
SITKVMRRLLPKSVF

SEQ ID NO: 272602 - protein, 15 aa, Artificial Sequence
  Description of Artificial Sequence: Synthetic peptide
  Seed: SIGKVCRTLLAKSVF
SITKVMRRLLQKSVF

SEQ ID NO: 272603 - protein, 15 aa, Artificial Sequence
  Description of Artificial Sequence: Synthetic peptide
  Seed: SIGKVCRTLLAKSVF
SITKVMRRLLSKSVF

SEQ ID NO: 272604 - protein, 15 aa, Artificial Sequence
  Description of Artificial Sequence: Synthetic peptide
  Seed: SIGKVCRTLLAKSVF
SITKVMRRLLTKSVF

SEQ ID NO: 272605 - protein, 15 aa, Artificial Sequence
  Description of Artificial Sequence: Synthetic peptide
  Seed: SIGKVCRTLLAKSVF
SITKVMRRLLVKSVF

SEQ ID NO: 272606 - protein, 15 aa, Artificial Sequence
  Description of Artificial Sequence: Synthetic peptide
  Seed: SIGKVCRTLLAKSVF
SITKVMRRLLYKSVF

SEQ ID NO: 272607 - protein, 15 aa, Artificial Sequence
  Description of Artificial Sequence: Synthetic peptide
  Seed: SIGKVCRTLLAKSVF
SITKVMRSLLAKSVF

SEQ ID NO: 272608 - protein, 15 aa, Artificial Sequence
  Description of Artificial Sequence: Synthetic peptide
  Seed: SIGKVCRTLLAKSVF
SITKVMRSLLGKSVF

SEQ ID NO: 272609 - protein, 15 aa, Artificial Sequence
  Description of Artificial Sequence: Synthetic peptide
  Seed: SIGKVCRTLLAKSVF
SITKVMRSLLQKSVF

SEQ ID NO: 272610 - protein, 15 aa, Artificial Sequence
  Description of Artificial Sequence: Synthetic peptide
  Seed: SIGKVCRTLLAKSVF
SITKVMRSLLSKSVF

SEQ ID NO: 272611 - protein, 15 aa, Artificial Sequence
  Description of Artificial Sequence: Synthetic peptide
  Seed: SIGKVCRTLLAKSVF
SITKVMRTLLAKSVF

SEQ ID NO: 272612 - protein, 15 aa, Artificial Sequence
  Description of Artificial Sequence: Synthetic peptide
  Seed: SIGKVCRTLLAKSVF
SITKVMRTLLGKSVF

SEQ ID NO: 272613 - protein, 15 aa, Artificial Sequence
  Description of Artificial Sequence: Synthetic peptide
  Seed: SIGKVCRTLLAKSVF
SITKVMRTLLQKSVF

SEQ ID NO: 272614 - protein, 15 aa, Artificial Sequence
  Description of Artificial Sequence: Synthetic peptide
  Seed: SIGKVCRTLLAKSVF
SITKVMRTLLSKSVF

SEQ ID NO: 272615 - protein, 15 aa, Artificial Sequence
  Description of Artificial Sequence: Synthetic peptide
  Seed: SIGKVCRTLLAKSVF
SITKVQRKLLAKSVF

SEQ ID NO: 272616 - protein, 15 aa, Artificial Sequence
  Description of Artificial Sequence: Synthetic peptide
  Seed: SIGKVCRTLLAKSVF
SITKVQRKLLGKSVF

SEQ ID NO: 272617 - protein, 15 aa, Artificial Sequence
  Description of Artificial Sequence: Synthetic peptide
  Seed: SIGKVCRTLLAKSVF
SITKVQRKLLQKSVF

SEQ ID NO: 272618 - protein, 15 aa, Artificial Sequence
  Description of Artificial Sequence: Synthetic peptide
  Seed: SIGKVCRTLLAKSVF
SITKVQRKLLSKSVF

SEQ ID NO: 272619 - protein, 15 aa, Artificial Sequence
  Description of Artificial Sequence: Synthetic peptide
  Seed: SIGKVCRTLLAKSVF
SITKVQRRLLAKSVF

SEQ ID NO: 272620 - protein, 15 aa, Artificial Sequence
  Description of Artificial Sequence: Synthetic peptide
  Seed: SIGKVCRTLLAKSVF
SITKVQRRLLGKSVF

SEQ ID NO: 272621 - protein, 15 aa, Artificial Sequence
  Description of Artificial Sequence: Synthetic peptide
  Seed: SIGKVCRTLLAKSVF
SITKVQRRLLQKSVF

SEQ ID NO: 272622 - protein, 15 aa, Artificial Sequence
  Description of Artificial Sequence: Synthetic peptide
  Seed: SIGKVCRTLLAKSVF
SITKVQRRLLSKSVF

SEQ ID NO: 272623 - protein, 15 aa, Artificial Sequence
  Description of Artificial Sequence: Synthetic peptide
  Seed: SIGKVCRTLLAKSVF
SITKVVRKLLAKSVF

SEQ ID NO: 272624 - protein, 15 aa, Artificial Sequence
  Description of Artificial Sequence: Synthetic peptide
  Seed: SIGKVCRTLLAKSVF
SITKVVRKLLGKSVF

SEQ ID NO: 272625 - protein, 15 aa, Artificial Sequence
  Description of Artificial Sequence: Synthetic peptide
  Seed: SIGKVCRTLLAKSVF
SITKVVRKLLQKSVF

SEQ ID NO: 272626 - protein, 15 aa, Artificial Sequence
  Description of Artificial Sequence: Synthetic peptide
  Seed: SIGKVCRTLLAKSVF
SITKVVRKLLSKSVF

SEQ ID NO: 272627 - protein, 15 aa, Artificial Sequence
  Description of Artificial Sequence: Synthetic peptide
  Seed: SIGKVCRTLLAKSVF
SITKVVRRLLAKSVF

SEQ ID NO: 272628 - protein, 15 aa, Artificial Sequence
  Description of Artificial Sequence: Synthetic peptide
  Seed: SIGKVCRTLLAKSVF
SITKVVRRLLCKSVF

SEQ ID NO: 272629 - protein, 15 aa, Artificial Sequence
  Description of Artificial Sequence: Synthetic peptide
  Seed: SIGKVCRTLLAKSVF
SITKVVRRLLGKSVF

SEQ ID NO: 272630 - protein, 15 aa, Artificial Sequence
  Description of Artificial Sequence: Synthetic peptide
  Seed: SIGKVCRTLLAKSVF
SITKVVRRLLQKSVF

SEQ ID NO: 272631 - protein, 15 aa, Artificial Sequence
  Description of Artificial Sequence: Synthetic peptide
  Seed: SIGKVCRTLLAKSVF
SITKVVRRLLSKSVF

SEQ ID NO: 272632 - protein, 15 aa, Artificial Sequence
  Description of Artificial Sequence: Synthetic peptide
  Seed: SIGKVCRTLLAKSVF
SITKVWRKLLAKSVF

SEQ ID NO: 272633 - protein, 15 aa, Artificial Sequence
  Description of Artificial Sequence: Synthetic peptide
  Seed: SIGKVCRTLLAKSVF
SITKVWRKLLGKSVF

SEQ ID NO: 272634 - protein, 15 aa, Artificial Sequence
  Description of Artificial Sequence: Synthetic peptide
  Seed: SIGKVCRTLLAKSVF
SITKVWRKLLQKSVF

SEQ ID NO: 272635 - protein, 15 aa, Artificial Sequence
  Description of Artificial Sequence: Synthetic peptide
  Seed: SIGKVCRTLLAKSVF
SITKVWRKLLSKSVF

SEQ ID NO: 272636 - protein, 15 aa, Artificial Sequence
  Description of Artificial Sequence: Synthetic peptide
  Seed: SIGKVCRTLLAKSVF
SITKVWRRLLAKSVF

SEQ ID NO: 272637 - protein, 15 aa, Artificial Sequence
  Description of Artificial Sequence: Synthetic peptide
  Seed: SIGKVCRTLLAKSVF
SITKVWRRLLGKSVF

SEQ ID NO: 272638 - protein, 15 aa, Artificial Sequence
  Description of Artificial Sequence: Synthetic peptide
  Seed: SIGKVCRTLLAKSVF
SITKVWRRLLQKSVF

SEQ ID NO: 272639 - protein, 15 aa, Artificial Sequence
  Description of Artificial Sequence: Synthetic peptide
  Seed: SIGKVCRTLLAKSVF
SITKVWRRLLSKSVF

SEQ ID NO: 272640 - protein, 15 aa, Artificial Sequence
  Description of Artificial Sequence: Synthetic peptide
  Seed: SIGKVCRTLLAKSVF
SITKVYRKLLAKSVF

SEQ ID NO: 272641 - protein, 15 aa, Artificial Sequence
  Description of Artificial Sequence: Synthetic peptide
  Seed: SIGKVCRTLLAKSVF
SITKVYRKLLGKSVF

SEQ ID NO: 272642 - protein, 15 aa, Artificial Sequence
  Description of Artificial Sequence: Synthetic peptide
  Seed: SIGKVCRTLLAKSVF
SITKVYRKLLSKSVF

SEQ ID NO: 272643 - protein, 15 aa, Artificial Sequence
  Description of Artificial Sequence: Synthetic peptide
  Seed: SIGKVCRTLLAKSVF
SITKVYRRLLAKSVF

SEQ ID NO: 272644 - protein, 15 aa, Artificial Sequence
  Description of Artificial Sequence: Synthetic peptide
  Seed: SIGKVCRTLLAKSVF
SITKVYRRLLGKSVF

SEQ ID NO: 272645 - protein, 15 aa, Artificial Sequence
  Description of Artificial Sequence: Synthetic peptide
  Seed: SIGKVCRTLLAKSVF
SIVKVARALLAKSVF

SEQ ID NO: 272646 - protein, 15 aa, Artificial Sequence
  Description of Artificial Sequence: Synthetic peptide
  Seed: SIGKVCRTLLAKSVF
SIVKVARALLGKSVF

SEQ ID NO: 272647 - protein, 15 aa, Artificial Sequence
  Description of Artificial Sequence: Synthetic peptide
  Seed: SIGKVCRTLLAKSVF
SIVKVARALLHKSVF

SEQ ID NO: 272648 - protein, 15 aa, Artificial Sequence
  Description of Artificial Sequence: Synthetic peptide
  Seed: SIGKVCRTLLAKSVF
SIVKVARALLQKSVF

SEQ ID NO: 272649 - protein, 15 aa, Artificial Sequence
  Description of Artificial Sequence: Synthetic peptide
  Seed: SIGKVCRTLLAKSVF
SIVKVARALLRKSVF

SEQ ID NO: 272650 - protein, 15 aa, Artificial Sequence
  Description of Artificial Sequence: Synthetic peptide
  Seed: SIGKVCRTLLAKSVF
SIVKVARALLSKSVF

SEQ ID NO: 272651 - protein, 15 aa, Artificial Sequence
  Description of Artificial Sequence: Synthetic peptide
  Seed: SIGKVCRTLLAKSVF
SIVKVARGLLGKSVF

SEQ ID NO: 272652 - protein, 15 aa, Artificial Sequence
  Description of Artificial Sequence: Synthetic peptide
  Seed: SIGKVCRTLLAKSVF
SIVKVARHLLAKSVF

SEQ ID NO: 272653 - protein, 15 aa, Artificial Sequence
  Description of Artificial Sequence: Synthetic peptide
  Seed: SIGKVCRTLLAKSVF
SIVKVARHLLGKSVF

SEQ ID NO: 272654 - protein, 15 aa, Artificial Sequence
  Description of Artificial Sequence: Synthetic peptide
  Seed: SIGKVCRTLLAKSVF
SIVKVARHLLHKSVF

SEQ ID NO: 272655 - protein, 15 aa, Artificial Sequence
  Description of Artificial Sequence: Synthetic peptide
  Seed: SIGKVCRTLLAKSVF
SIVKVARHLLNKSVF

SEQ ID NO: 272656 - protein, 15 aa, Artificial Sequence
  Description of Artificial Sequence: Synthetic peptide
  Seed: SIGKVCRTLLAKSVF
SIVKVARHLLQKSVF

SEQ ID NO: 272657 - protein, 15 aa, Artificial Sequence
  Description of Artificial Sequence: Synthetic peptide
  Seed: SIGKVCRTLLAKSVF
SIVKVARHLLSKSVF

SEQ ID NO: 272658 - protein, 15 aa, Artificial Sequence
  Description of Artificial Sequence: Synthetic peptide
  Seed: SIGKVCRTLLAKSVF
SIVKVARHLLTKSVF

SEQ ID NO: 272659 - protein, 15 aa, Artificial Sequence
  Description of Artificial Sequence: Synthetic peptide
  Seed: SIGKVCRTLLAKSVF
SIVKVARHLLVKSVF

SEQ ID NO: 272660 - protein, 15 aa, Artificial Sequence
  Description of Artificial Sequence: Synthetic peptide
  Seed: SIGKVCRTLLAKSVF
SIVKVARHLLYKSVF

SEQ ID NO: 272661 - protein, 15 aa, Artificial Sequence
  Description of Artificial Sequence: Synthetic peptide
  Seed: SIGKVCRTLLAKSVF
SIVKVARKLLAKSVF

SEQ ID NO: 272662 - protein, 15 aa, Artificial Sequence
  Description of Artificial Sequence: Synthetic peptide
  Seed: SIGKVCRTLLAKSVF
SIVKVARKLLCKSVF

SEQ ID NO: 272663 - protein, 15 aa, Artificial Sequence
  Description of Artificial Sequence: Synthetic peptide
  Seed: SIGKVCRTLLAKSVF
SIVKVARKLLDKSVF

SEQ ID NO: 272664 - protein, 15 aa, Artificial Sequence
  Description of Artificial Sequence: Synthetic peptide
  Seed: SIGKVCRTLLAKSVF
SIVKVARKLLEKSVF

SEQ ID NO: 272665 - protein, 15 aa, Artificial Sequence
  Description of Artificial Sequence: Synthetic peptide
  Seed: SIGKVCRTLLAKSVF
SIVKVARKLLFKSVF

SEQ ID NO: 272666 - protein, 15 aa, Artificial Sequence
  Description of Artificial Sequence: Synthetic peptide
  Seed: SIGKVCRTLLAKSVF
SIVKVARKLLGKSVF

SEQ ID NO: 272667 - protein, 15 aa, Artificial Sequence
  Description of Artificial Sequence: Synthetic peptide
  Seed: SIGKVCRTLLAKSVF
SIVKVARKLLHKSVF

SEQ ID NO: 272668 - protein, 15 aa, Artificial Sequence
  Description of Artificial Sequence: Synthetic peptide
  Seed: SIGKVCRTLLAKSVF
SIVKVARKLLIKSVF

SEQ ID NO: 272669 - protein, 15 aa, Artificial Sequence
  Description of Artificial Sequence: Synthetic peptide
  Seed: SIGKVCRTLLAKSVF
SIVKVARKLLKKSVF

SEQ ID NO: 272670 - protein, 15 aa, Artificial Sequence
  Description of Artificial Sequence: Synthetic peptide
  Seed: SIGKVCRTLLAKSVF
SIVKVARKLLLKSVF

SEQ ID NO: 272671 - protein, 15 aa, Artificial Sequence
  Description of Artificial Sequence: Synthetic peptide
  Seed: SIGKVCRTLLAKSVF
SIVKVARKLLMKSVF

SEQ ID NO: 272672 - protein, 15 aa, Artificial Sequence
  Description of Artificial Sequence: Synthetic peptide
  Seed: SIGKVCRTLLAKSVF
SIVKVARKLLNKSVF

SEQ ID NO: 272673 - protein, 15 aa, Artificial Sequence
  Description of Artificial Sequence: Synthetic peptide
  Seed: SIGKVCRTLLAKSVF
SIVKVARKLLPKSVF

SEQ ID NO: 272674 - protein, 15 aa, Artificial Sequence
  Description of Artificial Sequence: Synthetic peptide
  Seed: SIGKVCRTLLAKSVF
SIVKVARKLLQKSVF

SEQ ID NO: 272675 - protein, 15 aa, Artificial Sequence
  Description of Artificial Sequence: Synthetic peptide
  Seed: SIGKVCRTLLAKSVF
SIVKVARKLLRKSVF

SEQ ID NO: 272676 - protein, 15 aa, Artificial Sequence
  Description of Artificial Sequence: Synthetic peptide
  Seed: SIGKVCRTLLAKSVF
SIVKVARKLLSKSVF

SEQ ID NO: 272677 - protein, 15 aa, Artificial Sequence
  Description of Artificial Sequence: Synthetic peptide
  Seed: SIGKVCRTLLAKSVF
SIVKVARKLLTKSVF

SEQ ID NO: 272678 - protein, 15 aa, Artificial Sequence
  Description of Artificial Sequence: Synthetic peptide
  Seed: SIGKVCRTLLAKSVF
SIVKVARKLLVKSVF

SEQ ID NO: 272679 - protein, 15 aa, Artificial Sequence
  Description of Artificial Sequence: Synthetic peptide
  Seed: SIGKVCRTLLAKSVF
SIVKVARKLLYKSVF

SEQ ID NO: 272680 - protein, 15 aa, Artificial Sequence
  Description of Artificial Sequence: Synthetic peptide
  Seed: SIGKVCRTLLAKSVF
SIVKVARNLLAKSVF

SEQ ID NO: 272681 - protein, 15 aa, Artificial Sequence
  Description of Artificial Sequence: Synthetic peptide
  Seed: SIGKVCRTLLAKSVF
SIVKVARNLLGKSVF

SEQ ID NO: 272682 - protein, 15 aa, Artificial Sequence
  Description of Artificial Sequence: Synthetic peptide
  Seed: SIGKVCRTLLAKSVF
SIVKVARNLLHKSVF

SEQ ID NO: 272683 - protein, 15 aa, Artificial Sequence
  Description of Artificial Sequence: Synthetic peptide
  Seed: SIGKVCRTLLAKSVF
SIVKVARNLLQKSVF

SEQ ID NO: 272684 - protein, 15 aa, Artificial Sequence
  Description of Artificial Sequence: Synthetic peptide
  Seed: SIGKVCRTLLAKSVF
SIVKVARNLLSKSVF

SEQ ID NO: 272685 - protein, 15 aa, Artificial Sequence
  Description of Artificial Sequence: Synthetic peptide
  Seed: SIGKVCRTLLAKSVF
SIVKVARNLLTKSVF

SEQ ID NO: 272686 - protein, 15 aa, Artificial Sequence
  Description of Artificial Sequence: Synthetic peptide
  Seed: SIGKVCRTLLAKSVF
SIVKVARPLLAKSVF

SEQ ID NO: 272687 - protein, 15 aa, Artificial Sequence
  Description of Artificial Sequence: Synthetic peptide
  Seed: SIGKVCRTLLAKSVF
SIVKVARPLLGKSVF

SEQ ID NO: 272688 - protein, 15 aa, Artificial Sequence
  Description of Artificial Sequence: Synthetic peptide
  Seed: SIGKVCRTLLAKSVF
SIVKVARPLLQKSVF

SEQ ID NO: 272689 - protein, 15 aa, Artificial Sequence
  Description of Artificial Sequence: Synthetic peptide
  Seed: SIGKVCRTLLAKSVF
SIVKVARPLLSKSVF

SEQ ID NO: 272690 - protein, 15 aa, Artificial Sequence
  Description of Artificial Sequence: Synthetic peptide
  Seed: SIGKVCRTLLAKSVF
SIVKVARQLLAKSVF

SEQ ID NO: 272691 - protein, 15 aa, Artificial Sequence
  Description of Artificial Sequence: Synthetic peptide
  Seed: SIGKVCRTLLAKSVF
SIVKVARQLLGKSVF

SEQ ID NO: 272692 - protein, 15 aa, Artificial Sequence
  Description of Artificial Sequence: Synthetic peptide
  Seed: SIGKVCRTLLAKSVF
SIVKVARQLLQKSVF

SEQ ID NO: 272693 - protein, 15 aa, Artificial Sequence
  Description of Artificial Sequence: Synthetic peptide
  Seed: SIGKVCRTLLAKSVF
SIVKVARQLLSKSVF

SEQ ID NO: 272694 - protein, 15 aa, Artificial Sequence
  Description of Artificial Sequence: Synthetic peptide
  Seed: SIGKVCRTLLAKSVF
SIVKVARRLLAKSVF

SEQ ID NO: 272695 - protein, 15 aa, Artificial Sequence
  Description of Artificial Sequence: Synthetic peptide
  Seed: SIGKVCRTLLAKSVF
SIVKVARRLLCKSVF

SEQ ID NO: 272696 - protein, 15 aa, Artificial Sequence
  Description of Artificial Sequence: Synthetic peptide
  Seed: SIGKVCRTLLAKSVF
SIVKVARRLLDKSVF

SEQ ID NO: 272697 - protein, 15 aa, Artificial Sequence
  Description of Artificial Sequence: Synthetic peptide
  Seed: SIGKVCRTLLAKSVF
SIVKVARRLLEKSVF

SEQ ID NO: 272698 - protein, 15 aa, Artificial Sequence
  Description of Artificial Sequence: Synthetic peptide
  Seed: SIGKVCRTLLAKSVF
SIVKVARRLLFKSVF

SEQ ID NO: 272699 - protein, 15 aa, Artificial Sequence
  Description of Artificial Sequence: Synthetic peptide
  Seed: SIGKVCRTLLAKSVF
SIVKVARRLLGKSVF

SEQ ID NO: 272700 - protein, 15 aa, Artificial Sequence
  Description of Artificial Sequence: Synthetic peptide
  Seed: SIGKVCRTLLAKSVF
SIVKVARRLLHKSVF

SEQ ID NO: 272701 - protein, 15 aa, Artificial Sequence
  Description of Artificial Sequence: Synthetic peptide
  Seed: SIGKVCRTLLAKSVF
SIVKVARRLLIKSVF

SEQ ID NO: 272702 - protein, 15 aa, Artificial Sequence
  Description of Artificial Sequence: Synthetic peptide
  Seed: SIGKVCRTLLAKSVF
SIVKVARRLLKKSVF

SEQ ID NO: 272703 - protein, 15 aa, Artificial Sequence
  Description of Artificial Sequence: Synthetic peptide
  Seed: SIGKVCRTLLAKSVF
SIVKVARRLLLKSVF

SEQ ID NO: 272704 - protein, 15 aa, Artificial Sequence
  Description of Artificial Sequence: Synthetic peptide
  Seed: SIGKVCRTLLAKSVF
SIVKVARRLLMKSVF

SEQ ID NO: 272705 - protein, 15 aa, Artificial Sequence
  Description of Artificial Sequence: Synthetic peptide
  Seed: SIGKVCRTLLAKSVF
SIVKVARRLLNKSVF

SEQ ID NO: 272706 - protein, 15 aa, Artificial Sequence
  Description of Artificial Sequence: Synthetic peptide
  Seed: SIGKVCRTLLAKSVF
SIVKVARRLLPKSVF

SEQ ID NO: 272707 - protein, 15 aa, Artificial Sequence
  Description of Artificial Sequence: Synthetic peptide
  Seed: SIGKVCRTLLAKSVF
SIVKVARRLLQKSVF

SEQ ID NO: 272708 - protein, 15 aa, Artificial Sequence
  Description of Artificial Sequence: Synthetic peptide
  Seed: SIGKVCRTLLAKSVF
SIVKVARRLLRKSVF

SEQ ID NO: 272709 - protein, 15 aa, Artificial Sequence
  Description of Artificial Sequence: Synthetic peptide
  Seed: SIGKVCRTLLAKSVF
SIVKVARRLLSKSVF

SEQ ID NO: 272710 - protein, 15 aa, Artificial Sequence
  Description of Artificial Sequence: Synthetic peptide
  Seed: SIGKVCRTLLAKSVF
SIVKVARRLLTKSVF

SEQ ID NO: 272711 - protein, 15 aa, Artificial Sequence
  Description of Artificial Sequence: Synthetic peptide
  Seed: SIGKVCRTLLAKSVF
SIVKVARRLLVKSVF

SEQ ID NO: 272712 - protein, 15 aa, Artificial Sequence
  Description of Artificial Sequence: Synthetic peptide
  Seed: SIGKVCRTLLAKSVF
SIVKVARRLLYKSVF

SEQ ID NO: 272713 - protein, 15 aa, Artificial Sequence
  Description of Artificial Sequence: Synthetic peptide
  Seed: SIGKVCRTLLAKSVF
SIVKVARSLLAKSVF

SEQ ID NO: 272714 - protein, 15 aa, Artificial Sequence
  Description of Artificial Sequence: Synthetic peptide
  Seed: SIGKVCRTLLAKSVF
SIVKVARSLLGKSVF

SEQ ID NO: 272715 - protein, 15 aa, Artificial Sequence
  Description of Artificial Sequence: Synthetic peptide
  Seed: SIGKVCRTLLAKSVF
SIVKVARSLLHKSVF

SEQ ID NO: 272716 - protein, 15 aa, Artificial Sequence
  Description of Artificial Sequence: Synthetic peptide
  Seed: SIGKVCRTLLAKSVF
SIVKVARSLLQKSVF

SEQ ID NO: 272717 - protein, 15 aa, Artificial Sequence
  Description of Artificial Sequence: Synthetic peptide
  Seed: SIGKVCRTLLAKSVF
SIVKVARSLLRKSVF

SEQ ID NO: 272718 - protein, 15 aa, Artificial Sequence
  Description of Artificial Sequence: Synthetic peptide
  Seed: SIGKVCRTLLAKSVF
SIVKVARSLLSKSVF

SEQ ID NO: 272719 - protein, 15 aa, Artificial Sequence
  Description of Artificial Sequence: Synthetic peptide
  Seed: SIGKVCRTLLAKSVF
SIVKVARSLLYKSVF

SEQ ID NO: 272720 - protein, 15 aa, Artificial Sequence
  Description of Artificial Sequence: Synthetic peptide
  Seed: SIGKVCRTLLAKSVF
SIVKVARTLLAKSVF

SEQ ID NO: 272721 - protein, 15 aa, Artificial Sequence
  Description of Artificial Sequence: Synthetic peptide
  Seed: SIGKVCRTLLAKSVF
SIVKVARTLLGKSVF

SEQ ID NO: 272722 - protein, 15 aa, Artificial Sequence
  Description of Artificial Sequence: Synthetic peptide
  Seed: SIGKVCRTLLAKSVF
SIVKVARTLLHKSVF

SEQ ID NO: 272723 - protein, 15 aa, Artificial Sequence
  Description of Artificial Sequence: Synthetic peptide
  Seed: SIGKVCRTLLAKSVF
SIVKVARTLLKKSVF

SEQ ID NO: 272724 - protein, 15 aa, Artificial Sequence
  Description of Artificial Sequence: Synthetic peptide
  Seed: SIGKVCRTLLAKSVF
SIVKVARTLLQKSVF

SEQ ID NO: 272725 - protein, 15 aa, Artificial Sequence
  Description of Artificial Sequence: Synthetic peptide
  Seed: SIGKVCRTLLAKSVF
SIVKVARTLLRKSVF

SEQ ID NO: 272726 - protein, 15 aa, Artificial Sequence
  Description of Artificial Sequence: Synthetic peptide
  Seed: SIGKVCRTLLAKSVF
SIVKVARTLLSKSVF

SEQ ID NO: 272727 - protein, 15 aa, Artificial Sequence
  Description of Artificial Sequence: Synthetic peptide
  Seed: SIGKVCRTLLAKSVF
SIVKVARTLLTKSVF

SEQ ID NO: 272728 - protein, 15 aa, Artificial Sequence
  Description of Artificial Sequence: Synthetic peptide
  Seed: SIGKVCRTLLAKSVF
SIVKVARTLLYKSVF

SEQ ID NO: 272729 - protein, 15 aa, Artificial Sequence
  Description of Artificial Sequence: Synthetic peptide
  Seed: SIGKVCRTLLAKSVF
SIVKVARVLLRKSVF

SEQ ID NO: 272730 - protein, 15 aa, Artificial Sequence
  Description of Artificial Sequence: Synthetic peptide
  Seed: SIGKVCRTLLAKSVF
SIVKVARVLLSKSVF

SEQ ID NO: 272731 - protein, 15 aa, Artificial Sequence
  Description of Artificial Sequence: Synthetic peptide
  Seed: SIGKVCRTLLAKSVF
SIVKVCRALLAKSVF

SEQ ID NO: 272732 - protein, 15 aa, Artificial Sequence
  Description of Artificial Sequence: Synthetic peptide
  Seed: SIGKVCRTLLAKSVF
SIVKVCRALLGKSVF

SEQ ID NO: 272733 - protein, 15 aa, Artificial Sequence
  Description of Artificial Sequence: Synthetic peptide
  Seed: SIGKVCRTLLAKSVF
SIVKVCRALLQKSVF

SEQ ID NO: 272734 - protein, 15 aa, Artificial Sequence
  Description of Artificial Sequence: Synthetic peptide
  Seed: SIGKVCRTLLAKSVF
SIVKVCRALLRKSVF

SEQ ID NO: 272735 - protein, 15 aa, Artificial Sequence
  Description of Artificial Sequence: Synthetic peptide
  Seed: SIGKVCRTLLAKSVF
SIVKVCRALLSKSVF

SEQ ID NO: 272736 - protein, 15 aa, Artificial Sequence
  Description of Artificial Sequence: Synthetic peptide
  Seed: SIGKVCRTLLAKSVF
SIVKVCRALLYKSVF

SEQ ID NO: 272737 - protein, 15 aa, Artificial Sequence
  Description of Artificial Sequence: Synthetic peptide
  Seed: SIGKVCRTLLAKSVF
SIVKVCRGLLAKSVF

SEQ ID NO: 272738 - protein, 15 aa, Artificial Sequence
  Description of Artificial Sequence: Synthetic peptide
  Seed: SIGKVCRTLLAKSVF
SIVKVCRGLLRKSVF

SEQ ID NO: 272739 - protein, 15 aa, Artificial Sequence
  Description of Artificial Sequence: Synthetic peptide
  Seed: SIGKVCRTLLAKSVF
SIVKVCRGLLSKSVF

SEQ ID NO: 272740 - protein, 15 aa, Artificial Sequence
  Description of Artificial Sequence: Synthetic peptide
  Seed: SIGKVCRTLLAKSVF
SIVKVCRHLLAKSVF

SEQ ID NO: 272741 - protein, 15 aa, Artificial Sequence
  Description of Artificial Sequence: Synthetic peptide
  Seed: SIGKVCRTLLAKSVF
SIVKVCRHLLGKSVF

SEQ ID NO: 272742 - protein, 15 aa, Artificial Sequence
  Description of Artificial Sequence: Synthetic peptide
  Seed: SIGKVCRTLLAKSVF
SIVKVCRHLLHKSVF

SEQ ID NO: 272743 - protein, 15 aa, Artificial Sequence
  Description of Artificial Sequence: Synthetic peptide
  Seed: SIGKVCRTLLAKSVF
SIVKVCRHLLKKSVF

SEQ ID NO: 272744 - protein, 15 aa, Artificial Sequence
  Description of Artificial Sequence: Synthetic peptide
  Seed: SIGKVCRTLLAKSVF
SIVKVCRHLLMKSVF

SEQ ID NO: 272745 - protein, 15 aa, Artificial Sequence
  Description of Artificial Sequence: Synthetic peptide
  Seed: SIGKVCRTLLAKSVF
SIVKVCRHLLQKSVF

SEQ ID NO: 272746 - protein, 15 aa, Artificial Sequence
  Description of Artificial Sequence: Synthetic peptide
  Seed: SIGKVCRTLLAKSVF
SIVKVCRHLLRKSVF

SEQ ID NO: 272747 - protein, 15 aa, Artificial Sequence
  Description of Artificial Sequence: Synthetic peptide
  Seed: SIGKVCRTLLAKSVF
SIVKVCRHLLSKSVF

SEQ ID NO: 272748 - protein, 15 aa, Artificial Sequence
  Description of Artificial Sequence: Synthetic peptide
  Seed: SIGKVCRTLLAKSVF
SIVKVCRHLLTKSVF

SEQ ID NO: 272749 - protein, 15 aa, Artificial Sequence
  Description of Artificial Sequence: Synthetic peptide
  Seed: SIGKVCRTLLAKSVF
SIVKVCRHLLVKSVF

SEQ ID NO: 272750 - protein, 15 aa, Artificial Sequence
  Description of Artificial Sequence: Synthetic peptide
  Seed: SIGKVCRTLLAKSVF
SIVKVCRHLLYKSVF

SEQ ID NO: 272751 - protein, 15 aa, Artificial Sequence
  Description of Artificial Sequence: Synthetic peptide
  Seed: SIGKVCRTLLAKSVF
SIVKVCRILLRKSVF

SEQ ID NO: 272752 - protein, 15 aa, Artificial Sequence
  Description of Artificial Sequence: Synthetic peptide
  Seed: SIGKVCRTLLAKSVF
SIVKVCRKLLAKSVF

SEQ ID NO: 272753 - protein, 15 aa, Artificial Sequence
  Description of Artificial Sequence: Synthetic peptide
  Seed: SIGKVCRTLLAKSVF
SIVKVCRKLLCKSVF

SEQ ID NO: 272754 - protein, 15 aa, Artificial Sequence
  Description of Artificial Sequence: Synthetic peptide
  Seed: SIGKVCRTLLAKSVF
SIVKVCRKLLEKSVF

SEQ ID NO: 272755 - protein, 15 aa, Artificial Sequence
  Description of Artificial Sequence: Synthetic peptide
  Seed: SIGKVCRTLLAKSVF
SIVKVCRKLLFKSVF

SEQ ID NO: 272756 - protein, 15 aa, Artificial Sequence
  Description of Artificial Sequence: Synthetic peptide
  Seed: SIGKVCRTLLAKSVF
SIVKVCRKLLGKSVF

SEQ ID NO: 272757 - protein, 15 aa, Artificial Sequence
  Description of Artificial Sequence: Synthetic peptide
  Seed: SIGKVCRTLLAKSVF
SIVKVCRKLLHKSVF

SEQ ID NO: 272758 - protein, 15 aa, Artificial Sequence
  Description of Artificial Sequence: Synthetic peptide
  Seed: SIGKVCRTLLAKSVF
SIVKVCRKLLIKSVF

SEQ ID NO: 272759 - protein, 15 aa, Artificial Sequence
  Description of Artificial Sequence: Synthetic peptide
  Seed: SIGKVCRTLLAKSVF
SIVKVCRKLLKKSVF

SEQ ID NO: 272760 - protein, 15 aa, Artificial Sequence
  Description of Artificial Sequence: Synthetic peptide
  Seed: SIGKVCRTLLAKSVF
SIVKVCRKLLLKSVF

SEQ ID NO: 272761 - protein, 15 aa, Artificial Sequence
  Description of Artificial Sequence: Synthetic peptide
  Seed: SIGKVCRTLLAKSVF
SIVKVCRKLLMKSVF

SEQ ID NO: 272762 - protein, 15 aa, Artificial Sequence
  Description of Artificial Sequence: Synthetic peptide
  Seed: SIGKVCRTLLAKSVF
SIVKVCRKLLNKSVF

SEQ ID NO: 272763 - protein, 15 aa, Artificial Sequence
  Description of Artificial Sequence: Synthetic peptide
  Seed: SIGKVCRTLLAKSVF
SIVKVCRKLLPKSVF

SEQ ID NO: 272764 - protein, 15 aa, Artificial Sequence
  Description of Artificial Sequence: Synthetic peptide
  Seed: SIGKVCRTLLAKSVF
SIVKVCRKLLQKSVF

SEQ ID NO: 272765 - protein, 15 aa, Artificial Sequence
  Description of Artificial Sequence: Synthetic peptide
  Seed: SIGKVCRTLLAKSVF
SIVKVCRKLLRKSVF

SEQ ID NO: 272766 - protein, 15 aa, Artificial Sequence
  Description of Artificial Sequence: Synthetic peptide
  Seed: SIGKVCRTLLAKSVF
SIVKVCRKLLSKSVF

SEQ ID NO: 272767 - protein, 15 aa, Artificial Sequence
  Description of Artificial Sequence: Synthetic peptide
  Seed: SIGKVCRTLLAKSVF
SIVKVCRKLLTKSVF

SEQ ID NO: 272768 - protein, 15 aa, Artificial Sequence
  Description of Artificial Sequence: Synthetic peptide
  Seed: SIGKVCRTLLAKSVF
SIVKVCRKLLVKSVF

SEQ ID NO: 272769 - protein, 15 aa, Artificial Sequence
  Description of Artificial Sequence: Synthetic peptide
  Seed: SIGKVCRTLLAKSVF
SIVKVCRKLLWKSVF

SEQ ID NO: 272770 - protein, 15 aa, Artificial Sequence
  Description of Artificial Sequence: Synthetic peptide
  Seed: SIGKVCRTLLAKSVF
SIVKVCRKLLYKSVF

SEQ ID NO: 272771 - protein, 15 aa, Artificial Sequence
  Description of Artificial Sequence: Synthetic peptide
  Seed: SIGKVCRTLLAKSVF
SIVKVCRMLLRKSVF

SEQ ID NO: 272772 - protein, 15 aa, Artificial Sequence
  Description of Artificial Sequence: Synthetic peptide
  Seed: SIGKVCRTLLAKSVF
SIVKVCRNLLAKSVF

SEQ ID NO: 272773 - protein, 15 aa, Artificial Sequence
  Description of Artificial Sequence: Synthetic peptide
  Seed: SIGKVCRTLLAKSVF
SIVKVCRNLLRKSVF

SEQ ID NO: 272774 - protein, 15 aa, Artificial Sequence
  Description of Artificial Sequence: Synthetic peptide
  Seed: SIGKVCRTLLAKSVF
SIVKVCRNLLSKSVF

SEQ ID NO: 272775 - protein, 15 aa, Artificial Sequence
  Description of Artificial Sequence: Synthetic peptide
  Seed: SIGKVCRTLLAKSVF
SIVKVCRPLLAKSVF

SEQ ID NO: 272776 - protein, 15 aa, Artificial Sequence
  Description of Artificial Sequence: Synthetic peptide
  Seed: SIGKVCRTLLAKSVF
SIVKVCRPLLGKSVF

SEQ ID NO: 272777 - protein, 15 aa, Artificial Sequence
  Description of Artificial Sequence: Synthetic peptide
  Seed: SIGKVCRTLLAKSVF
SIVKVCRPLLQKSVF

SEQ ID NO: 272778 - protein, 15 aa, Artificial Sequence
  Description of Artificial Sequence: Synthetic peptide
  Seed: SIGKVCRTLLAKSVF
SIVKVCRPLLRKSVF

SEQ ID NO: 272779 - protein, 15 aa, Artificial Sequence
  Description of Artificial Sequence: Synthetic peptide
  Seed: SIGKVCRTLLAKSVF
SIVKVCRPLLSKSVF

SEQ ID NO: 272780 - protein, 15 aa, Artificial Sequence
  Description of Artificial Sequence: Synthetic peptide
  Seed: SIGKVCRTLLAKSVF
SIVKVCRQLLRKSVF

SEQ ID NO: 272781 - protein, 15 aa, Artificial Sequence
  Description of Artificial Sequence: Synthetic peptide
  Seed: SIGKVCRTLLAKSVF
SIVKVCRRLLAKSVF

SEQ ID NO: 272782 - protein, 15 aa, Artificial Sequence
  Description of Artificial Sequence: Synthetic peptide
  Seed: SIGKVCRTLLAKSVF
SIVKVCRRLLCKSVF

SEQ ID NO: 272783 - protein, 15 aa, Artificial Sequence
  Description of Artificial Sequence: Synthetic peptide
  Seed: SIGKVCRTLLAKSVF
SIVKVCRRLLDKSVF

SEQ ID NO: 272784 - protein, 15 aa, Artificial Sequence
  Description of Artificial Sequence: Synthetic peptide
  Seed: SIGKVCRTLLAKSVF
SIVKVCRRLLEKSVF

SEQ ID NO: 272785 - protein, 15 aa, Artificial Sequence
  Description of Artificial Sequence: Synthetic peptide
  Seed: SIGKVCRTLLAKSVF
SIVKVCRRLLFKSVF

SEQ ID NO: 272786 - protein, 15 aa, Artificial Sequence
  Description of Artificial Sequence: Synthetic peptide
  Seed: SIGKVCRTLLAKSVF
SIVKVCRRLLGKSVF

SEQ ID NO: 272787 - protein, 15 aa, Artificial Sequence
  Description of Artificial Sequence: Synthetic peptide
  Seed: SIGKVCRTLLAKSVF
SIVKVCRRLLHKSVF

SEQ ID NO: 272788 - protein, 15 aa, Artificial Sequence
  Description of Artificial Sequence: Synthetic peptide
  Seed: SIGKVCRTLLAKSVF
SIVKVCRRLLIKSVF

SEQ ID NO: 272789 - protein, 15 aa, Artificial Sequence
  Description of Artificial Sequence: Synthetic peptide
  Seed: SIGKVCRTLLAKSVF
SIVKVCRRLLKKSVF

SEQ ID NO: 272790 - protein, 15 aa, Artificial Sequence
  Description of Artificial Sequence: Synthetic peptide
  Seed: SIGKVCRTLLAKSVF
SIVKVCRRLLLKSVF

SEQ ID NO: 272791 - protein, 15 aa, Artificial Sequence
  Description of Artificial Sequence: Synthetic peptide
  Seed: SIGKVCRTLLAKSVF
SIVKVCRRLLMKSVF

SEQ ID NO: 272792 - protein, 15 aa, Artificial Sequence
  Description of Artificial Sequence: Synthetic peptide
  Seed: SIGKVCRTLLAKSVF
SIVKVCRRLLNKSVF

SEQ ID NO: 272793 - protein, 15 aa, Artificial Sequence
  Description of Artificial Sequence: Synthetic peptide
  Seed: SIGKVCRTLLAKSVF
SIVKVCRRLLPKSVF

SEQ ID NO: 272794 - protein, 15 aa, Artificial Sequence
  Description of Artificial Sequence: Synthetic peptide
  Seed: SIGKVCRTLLAKSVF
SIVKVCRRLLQKSVF

SEQ ID NO: 272795 - protein, 15 aa, Artificial Sequence
  Description of Artificial Sequence: Synthetic peptide
  Seed: SIGKVCRTLLAKSVF
SIVKVCRRLLRKSVF

SEQ ID NO: 272796 - protein, 15 aa, Artificial Sequence
  Description of Artificial Sequence: Synthetic peptide
  Seed: SIGKVCRTLLAKSVF
SIVKVCRRLLSKSVF

SEQ ID NO: 272797 - protein, 15 aa, Artificial Sequence
  Description of Artificial Sequence: Synthetic peptide
  Seed: SIGKVCRTLLAKSVF
SIVKVCRRLLTKSVF

SEQ ID NO: 272798 - protein, 15 aa, Artificial Sequence
  Description of Artificial Sequence: Synthetic peptide
  Seed: SIGKVCRTLLAKSVF
SIVKVCRRLLVKSVF

SEQ ID NO: 272799 - protein, 15 aa, Artificial Sequence
  Description of Artificial Sequence: Synthetic peptide
  Seed: SIGKVCRTLLAKSVF
SIVKVCRRLLWKSVF

SEQ ID NO: 272800 - protein, 15 aa, Artificial Sequence
  Description of Artificial Sequence: Synthetic peptide
  Seed: SIGKVCRTLLAKSVF
SIVKVCRRLLYKSVF

SEQ ID NO: 272801 - protein, 15 aa, Artificial Sequence
  Description of Artificial Sequence: Synthetic peptide
  Seed: SIGKVCRTLLAKSVF
SIVKVCRSLLAKSVF

SEQ ID NO: 272802 - protein, 15 aa, Artificial Sequence
  Description of Artificial Sequence: Synthetic peptide
  Seed: SIGKVCRTLLAKSVF
SIVKVCRSLLGKSVF

SEQ ID NO: 272803 - protein, 15 aa, Artificial Sequence
  Description of Artificial Sequence: Synthetic peptide
  Seed: SIGKVCRTLLAKSVF
SIVKVCRSLLHKSVF

SEQ ID NO: 272804 - protein, 15 aa, Artificial Sequence
  Description of Artificial Sequence: Synthetic peptide
  Seed: SIGKVCRTLLAKSVF
SIVKVCRSLLKKSVF

SEQ ID NO: 272805 - protein, 15 aa, Artificial Sequence
  Description of Artificial Sequence: Synthetic peptide
  Seed: SIGKVCRTLLAKSVF
SIVKVCRSLLRKSVF

SEQ ID NO: 272806 - protein, 15 aa, Artificial Sequence
  Description of Artificial Sequence: Synthetic peptide
  Seed: SIGKVCRTLLAKSVF
SIVKVCRSLLSKSVF

SEQ ID NO: 272807 - protein, 15 aa, Artificial Sequence
  Description of Artificial Sequence: Synthetic peptide
  Seed: SIGKVCRTLLAKSVF
SIVKVCRTLLAKSVF

SEQ ID NO: 272808 - protein, 15 aa, Artificial Sequence
  Description of Artificial Sequence: Synthetic peptide
  Seed: SIGKVCRTLLAKSVF
SIVKVCRTLLHKSVF

SEQ ID NO: 272809 - protein, 15 aa, Artificial Sequence
  Description of Artificial Sequence: Synthetic peptide
  Seed: SIGKVCRTLLAKSVF
SIVKVCRTLLKKSVF

SEQ ID NO: 272810 - protein, 15 aa, Artificial Sequence
  Description of Artificial Sequence: Synthetic peptide
  Seed: SIGKVCRTLLAKSVF
SIVKVCRTLLRKSVF

SEQ ID NO: 272811 - protein, 15 aa, Artificial Sequence
  Description of Artificial Sequence: Synthetic peptide
  Seed: SIGKVCRTLLAKSVF
SIVKVCRTLLSKSVF

SEQ ID NO: 272812 - protein, 15 aa, Artificial Sequence
  Description of Artificial Sequence: Synthetic peptide
  Seed: SIGKVCRTLLAKSVF
SIVKVCRVLLKKSVF

SEQ ID NO: 272813 - protein, 15 aa, Artificial Sequence
  Description of Artificial Sequence: Synthetic peptide
  Seed: SIGKVCRTLLAKSVF
SIVKVCRVLLRKSVF

SEQ ID NO: 272814 - protein, 15 aa, Artificial Sequence
  Description of Artificial Sequence: Synthetic peptide
  Seed: SIGKVCRTLLAKSVF
SIVKVDRKLLAKSVF

SEQ ID NO: 272815 - protein, 15 aa, Artificial Sequence
  Description of Artificial Sequence: Synthetic peptide
  Seed: SIGKVCRTLLAKSVF
SIVKVDRKLLSKSVF

SEQ ID NO: 272816 - protein, 15 aa, Artificial Sequence
  Description of Artificial Sequence: Synthetic peptide
  Seed: SIGKVCRTLLAKSVF
SIVKVDRRLLAKSVF

SEQ ID NO: 272817 - protein, 15 aa, Artificial Sequence
  Description of Artificial Sequence: Synthetic peptide
  Seed: SIGKVCRTLLAKSVF
SIVKVDRRLLGKSVF

SEQ ID NO: 272818 - protein, 15 aa, Artificial Sequence
  Description of Artificial Sequence: Synthetic peptide
  Seed: SIGKVCRTLLAKSVF
SIVKVDRRLLHKSVF

SEQ ID NO: 272819 - protein, 15 aa, Artificial Sequence
  Description of Artificial Sequence: Synthetic peptide
  Seed: SIGKVCRTLLAKSVF
SIVKVDRRLLIKSVF

SEQ ID NO: 272820 - protein, 15 aa, Artificial Sequence
  Description of Artificial Sequence: Synthetic peptide
  Seed: SIGKVCRTLLAKSVF
SIVKVDRRLLLKSVF

SEQ ID NO: 272821 - protein, 15 aa, Artificial Sequence
  Description of Artificial Sequence: Synthetic peptide
  Seed: SIGKVCRTLLAKSVF
SIVKVDRRLLMKSVF

SEQ ID NO: 272822 - protein, 15 aa, Artificial Sequence
  Description of Artificial Sequence: Synthetic peptide
  Seed: SIGKVCRTLLAKSVF
SIVKVDRRLLNKSVF

SEQ ID NO: 272823 - protein, 15 aa, Artificial Sequence
  Description of Artificial Sequence: Synthetic peptide
  Seed: SIGKVCRTLLAKSVF
SIVKVDRRLLQKSVF

SEQ ID NO: 272824 - protein, 15 aa, Artificial Sequence
  Description of Artificial Sequence: Synthetic peptide
  Seed: SIGKVCRTLLAKSVF
SIVKVDRRLLSKSVF

SEQ ID NO: 272825 - protein, 15 aa, Artificial Sequence
  Description of Artificial Sequence: Synthetic peptide
  Seed: SIGKVCRTLLAKSVF
SIVKVDRRLLTKSVF

SEQ ID NO: 272826 - protein, 15 aa, Artificial Sequence
  Description of Artificial Sequence: Synthetic peptide
  Seed: SIGKVCRTLLAKSVF
SIVKVDRRLLVKSVF

SEQ ID NO: 272827 - protein, 15 aa, Artificial Sequence
  Description of Artificial Sequence: Synthetic peptide
  Seed: SIGKVCRTLLAKSVF
SIVKVDRRLLYKSVF

SEQ ID NO: 272828 - protein, 15 aa, Artificial Sequence
  Description of Artificial Sequence: Synthetic peptide
  Seed: SIGKVCRTLLAKSVF
SIVKVERKLLAKSVF

SEQ ID NO: 272829 - protein, 15 aa, Artificial Sequence
  Description of Artificial Sequence: Synthetic peptide
  Seed: SIGKVCRTLLAKSVF
SIVKVERKLLGKSVF

SEQ ID NO: 272830 - protein, 15 aa, Artificial Sequence
  Description of Artificial Sequence: Synthetic peptide
  Seed: SIGKVCRTLLAKSVF
SIVKVERKLLHKSVF

SEQ ID NO: 272831 - protein, 15 aa, Artificial Sequence
  Description of Artificial Sequence: Synthetic peptide
  Seed: SIGKVCRTLLAKSVF
SIVKVERKLLIKSVF

SEQ ID NO: 272832 - protein, 15 aa, Artificial Sequence
  Description of Artificial Sequence: Synthetic peptide
  Seed: SIGKVCRTLLAKSVF
SIVKVERKLLKKSVF

SEQ ID NO: 272833 - protein, 15 aa, Artificial Sequence
  Description of Artificial Sequence: Synthetic peptide
  Seed: SIGKVCRTLLAKSVF
SIVKVERKLLLKSVF

SEQ ID NO: 272834 - protein, 15 aa, Artificial Sequence
  Description of Artificial Sequence: Synthetic peptide
  Seed: SIGKVCRTLLAKSVF
SIVKVERKLLMKSVF

SEQ ID NO: 272835 - protein, 15 aa, Artificial Sequence
  Description of Artificial Sequence: Synthetic peptide
  Seed: SIGKVCRTLLAKSVF
SIVKVERKLLNKSVF

SEQ ID NO: 272836 - protein, 15 aa, Artificial Sequence
  Description of Artificial Sequence: Synthetic peptide
  Seed: SIGKVCRTLLAKSVF
SIVKVERKLLQKSVF

SEQ ID NO: 272837 - protein, 15 aa, Artificial Sequence
  Description of Artificial Sequence: Synthetic peptide
  Seed: SIGKVCRTLLAKSVF
SIVKVERKLLRKSVF

SEQ ID NO: 272838 - protein, 15 aa, Artificial Sequence
  Description of Artificial Sequence: Synthetic peptide
  Seed: SIGKVCRTLLAKSVF
SIVKVERKLLSKSVF

SEQ ID NO: 272839 - protein, 15 aa, Artificial Sequence
  Description of Artificial Sequence: Synthetic peptide
  Seed: SIGKVCRTLLAKSVF
SIVKVERKLLTKSVF

SEQ ID NO: 272840 - protein, 15 aa, Artificial Sequence
  Description of Artificial Sequence: Synthetic peptide
  Seed: SIGKVCRTLLAKSVF
SIVKVERKLLVKSVF

SEQ ID NO: 272841 - protein, 15 aa, Artificial Sequence
  Description of Artificial Sequence: Synthetic peptide
  Seed: SIGKVCRTLLAKSVF
SIVKVERKLLYKSVF

SEQ ID NO: 272842 - protein, 15 aa, Artificial Sequence
  Description of Artificial Sequence: Synthetic peptide
  Seed: SIGKVCRTLLAKSVF
SIVKVERRLLAKSVF

SEQ ID NO: 272843 - protein, 15 aa, Artificial Sequence
  Description of Artificial Sequence: Synthetic peptide
  Seed: SIGKVCRTLLAKSVF
SIVKVERRLLCKSVF

SEQ ID NO: 272844 - protein, 15 aa, Artificial Sequence
  Description of Artificial Sequence: Synthetic peptide
  Seed: SIGKVCRTLLAKSVF
SIVKVERRLLEKSVF

SEQ ID NO: 272845 - protein, 15 aa, Artificial Sequence
  Description of Artificial Sequence: Synthetic peptide
  Seed: SIGKVCRTLLAKSVF
SIVKVERRLLFKSVF

SEQ ID NO: 272846 - protein, 15 aa, Artificial Sequence
  Description of Artificial Sequence: Synthetic peptide
  Seed: SIGKVCRTLLAKSVF
SIVKVERRLLGKSVF

SEQ ID NO: 272847 - protein, 15 aa, Artificial Sequence
  Description of Artificial Sequence: Synthetic peptide
  Seed: SIGKVCRTLLAKSVF
SIVKVERRLLHKSVF

SEQ ID NO: 272848 - protein, 15 aa, Artificial Sequence
  Description of Artificial Sequence: Synthetic peptide
  Seed: SIGKVCRTLLAKSVF
SIVKVERRLLIKSVF

SEQ ID NO: 272849 - protein, 15 aa, Artificial Sequence
  Description of Artificial Sequence: Synthetic peptide
  Seed: SIGKVCRTLLAKSVF
SIVKVERRLLKKSVF

SEQ ID NO: 272850 - protein, 15 aa, Artificial Sequence
  Description of Artificial Sequence: Synthetic peptide
  Seed: SIGKVCRTLLAKSVF
SIVKVERRLLLKSVF

SEQ ID NO: 272851 - protein, 15 aa, Artificial Sequence
  Description of Artificial Sequence: Synthetic peptide
  Seed: SIGKVCRTLLAKSVF
SIVKVERRLLMKSVF

SEQ ID NO: 272852 - protein, 15 aa, Artificial Sequence
  Description of Artificial Sequence: Synthetic peptide
  Seed: SIGKVCRTLLAKSVF
SIVKVERRLLNKSVF

SEQ ID NO: 272853 - protein, 15 aa, Artificial Sequence
  Description of Artificial Sequence: Synthetic peptide
  Seed: SIGKVCRTLLAKSVF
SIVKVERRLLPKSVF

SEQ ID NO: 272854 - protein, 15 aa, Artificial Sequence
  Description of Artificial Sequence: Synthetic peptide
  Seed: SIGKVCRTLLAKSVF
SIVKVERRLLQKSVF

SEQ ID NO: 272855 - protein, 15 aa, Artificial Sequence
  Description of Artificial Sequence: Synthetic peptide
  Seed: SIGKVCRTLLAKSVF
SIVKVERRLLRKSVF

SEQ ID NO: 272856 - protein, 15 aa, Artificial Sequence
  Description of Artificial Sequence: Synthetic peptide
  Seed: SIGKVCRTLLAKSVF
SIVKVERRLLSKSVF

SEQ ID NO: 272857 - protein, 15 aa, Artificial Sequence
  Description of Artificial Sequence: Synthetic peptide
  Seed: SIGKVCRTLLAKSVF
SIVKVERRLLTKSVF

SEQ ID NO: 272858 - protein, 15 aa, Artificial Sequence
  Description of Artificial Sequence: Synthetic peptide
  Seed: SIGKVCRTLLAKSVF
SIVKVERRLLVKSVF

SEQ ID NO: 272859 - protein, 15 aa, Artificial Sequence
  Description of Artificial Sequence: Synthetic peptide
  Seed: SIGKVCRTLLAKSVF
SIVKVERRLLYKSVF

SEQ ID NO: 272860 - protein, 15 aa, Artificial Sequence
  Description of Artificial Sequence: Synthetic peptide
  Seed: SIGKVCRTLLAKSVF
SIVKVFRALLAKSVF

SEQ ID NO: 272861 - protein, 15 aa, Artificial Sequence
  Description of Artificial Sequence: Synthetic peptide
  Seed: SIGKVCRTLLAKSVF
SIVKVFRALLGKSVF

SEQ ID NO: 272862 - protein, 15 aa, Artificial Sequence
  Description of Artificial Sequence: Synthetic peptide
  Seed: SIGKVCRTLLAKSVF
SIVKVFRALLHKSVF

SEQ ID NO: 272863 - protein, 15 aa, Artificial Sequence
  Description of Artificial Sequence: Synthetic peptide
  Seed: SIGKVCRTLLAKSVF
SIVKVFRALLQKSVF

SEQ ID NO: 272864 - protein, 15 aa, Artificial Sequence
  Description of Artificial Sequence: Synthetic peptide
  Seed: SIGKVCRTLLAKSVF
SIVKVFRALLRKSVF

SEQ ID NO: 272865 - protein, 15 aa, Artificial Sequence
  Description of Artificial Sequence: Synthetic peptide
  Seed: SIGKVCRTLLAKSVF
SIVKVFRALLSKSVF

SEQ ID NO: 272866 - protein, 15 aa, Artificial Sequence
  Description of Artificial Sequence: Synthetic peptide
  Seed: SIGKVCRTLLAKSVF
SIVKVFRELLRKSVF

SEQ ID NO: 272867 - protein, 15 aa, Artificial Sequence
  Description of Artificial Sequence: Synthetic peptide
  Seed: SIGKVCRTLLAKSVF
SIVKVFRGLLAKSVF

SEQ ID NO: 272868 - protein, 15 aa, Artificial Sequence
  Description of Artificial Sequence: Synthetic peptide
  Seed: SIGKVCRTLLAKSVF
SIVKVFRGLLGKSVF

SEQ ID NO: 272869 - protein, 15 aa, Artificial Sequence
  Description of Artificial Sequence: Synthetic peptide
  Seed: SIGKVCRTLLAKSVF
SIVKVFRGLLQKSVF

SEQ ID NO: 272870 - protein, 15 aa, Artificial Sequence
  Description of Artificial Sequence: Synthetic peptide
  Seed: SIGKVCRTLLAKSVF
SIVKVFRGLLSKSVF

SEQ ID NO: 272871 - protein, 15 aa, Artificial Sequence
  Description of Artificial Sequence: Synthetic peptide
  Seed: SIGKVCRTLLAKSVF
SIVKVFRHLLAKSVF

SEQ ID NO: 272872 - protein, 15 aa, Artificial Sequence
  Description of Artificial Sequence: Synthetic peptide
  Seed: SIGKVCRTLLAKSVF
SIVKVFRHLLGKSVF

SEQ ID NO: 272873 - protein, 15 aa, Artificial Sequence
  Description of Artificial Sequence: Synthetic peptide
  Seed: SIGKVCRTLLAKSVF
SIVKVFRHLLHKSVF

SEQ ID NO: 272874 - protein, 15 aa, Artificial Sequence
  Description of Artificial Sequence: Synthetic peptide
  Seed: SIGKVCRTLLAKSVF
SIVKVFRHLLIKSVF

SEQ ID NO: 272875 - protein, 15 aa, Artificial Sequence
  Description of Artificial Sequence: Synthetic peptide
  Seed: SIGKVCRTLLAKSVF
SIVKVFRHLLKKSVF

SEQ ID NO: 272876 - protein, 15 aa, Artificial Sequence
  Description of Artificial Sequence: Synthetic peptide
  Seed: SIGKVCRTLLAKSVF
SIVKVFRHLLMKSVF

SEQ ID NO: 272877 - protein, 15 aa, Artificial Sequence
  Description of Artificial Sequence: Synthetic peptide
  Seed: SIGKVCRTLLAKSVF
SIVKVFRHLLNKSVF

SEQ ID NO: 272878 - protein, 15 aa, Artificial Sequence
  Description of Artificial Sequence: Synthetic peptide
  Seed: SIGKVCRTLLAKSVF
SIVKVFRHLLQKSVF

SEQ ID NO: 272879 - protein, 15 aa, Artificial Sequence
  Description of Artificial Sequence: Synthetic peptide
  Seed: SIGKVCRTLLAKSVF
SIVKVFRHLLRKSVF

SEQ ID NO: 272880 - protein, 15 aa, Artificial Sequence
  Description of Artificial Sequence: Synthetic peptide
  Seed: SIGKVCRTLLAKSVF
SIVKVFRHLLSKSVF

SEQ ID NO: 272881 - protein, 15 aa, Artificial Sequence
  Description of Artificial Sequence: Synthetic peptide
  Seed: SIGKVCRTLLAKSVF
SIVKVFRHLLTKSVF

SEQ ID NO: 272882 - protein, 15 aa, Artificial Sequence
  Description of Artificial Sequence: Synthetic peptide
  Seed: SIGKVCRTLLAKSVF
SIVKVFRHLLVKSVF

SEQ ID NO: 272883 - protein, 15 aa, Artificial Sequence
  Description of Artificial Sequence: Synthetic peptide
  Seed: SIGKVCRTLLAKSVF
SIVKVFRHLLYKSVF

SEQ ID NO: 272884 - protein, 15 aa, Artificial Sequence
  Description of Artificial Sequence: Synthetic peptide
  Seed: SIGKVCRTLLAKSVF
SIVKVFRKLLAKSVF

SEQ ID NO: 272885 - protein, 15 aa, Artificial Sequence
  Description of Artificial Sequence: Synthetic peptide
  Seed: SIGKVCRTLLAKSVF
SIVKVFRKLLCKSVF

SEQ ID NO: 272886 - protein, 15 aa, Artificial Sequence
  Description of Artificial Sequence: Synthetic peptide
  Seed: SIGKVCRTLLAKSVF
SIVKVFRKLLDKSVF

SEQ ID NO: 272887 - protein, 15 aa, Artificial Sequence
  Description of Artificial Sequence: Synthetic peptide
  Seed: SIGKVCRTLLAKSVF
SIVKVFRKLLEKSVF

SEQ ID NO: 272888 - protein, 15 aa, Artificial Sequence
  Description of Artificial Sequence: Synthetic peptide
  Seed: SIGKVCRTLLAKSVF
SIVKVFRKLLFKSVF

SEQ ID NO: 272889 - protein, 15 aa, Artificial Sequence
  Description of Artificial Sequence: Synthetic peptide
  Seed: SIGKVCRTLLAKSVF
SIVKVFRKLLGKSVF

SEQ ID NO: 272890 - protein, 15 aa, Artificial Sequence
  Description of Artificial Sequence: Synthetic peptide
  Seed: SIGKVCRTLLAKSVF
SIVKVFRKLLHKSVF

SEQ ID NO: 272891 - protein, 15 aa, Artificial Sequence
  Description of Artificial Sequence: Synthetic peptide
  Seed: SIGKVCRTLLAKSVF
SIVKVFRKLLIKSVF

SEQ ID NO: 272892 - protein, 15 aa, Artificial Sequence
  Description of Artificial Sequence: Synthetic peptide
  Seed: SIGKVCRTLLAKSVF
SIVKVFRKLLKKSVF

SEQ ID NO: 272893 - protein, 15 aa, Artificial Sequence
  Description of Artificial Sequence: Synthetic peptide
  Seed: SIGKVCRTLLAKSVF
SIVKVFRKLLLKSVF

SEQ ID NO: 272894 - protein, 15 aa, Artificial Sequence
  Description of Artificial Sequence: Synthetic peptide
  Seed: SIGKVCRTLLAKSVF
SIVKVFRKLLMKSVF

SEQ ID NO: 272895 - protein, 15 aa, Artificial Sequence
  Description of Artificial Sequence: Synthetic peptide
  Seed: SIGKVCRTLLAKSVF
SIVKVFRKLLNKSVF

SEQ ID NO: 272896 - protein, 15 aa, Artificial Sequence
  Description of Artificial Sequence: Synthetic peptide
  Seed: SIGKVCRTLLAKSVF
SIVKVFRKLLPKSVF

SEQ ID NO: 272897 - protein, 15 aa, Artificial Sequence
  Description of Artificial Sequence: Synthetic peptide
  Seed: SIGKVCRTLLAKSVF
SIVKVFRKLLQKSVF

SEQ ID NO: 272898 - protein, 15 aa, Artificial Sequence
  Description of Artificial Sequence: Synthetic peptide
  Seed: SIGKVCRTLLAKSVF
SIVKVFRKLLRKSVF

SEQ ID NO: 272899 - protein, 15 aa, Artificial Sequence
  Description of Artificial Sequence: Synthetic peptide
  Seed: SIGKVCRTLLAKSVF
SIVKVFRKLLSKSVF

SEQ ID NO: 272900 - protein, 15 aa, Artificial Sequence
  Description of Artificial Sequence: Synthetic peptide
  Seed: SIGKVCRTLLAKSVF
SIVKVFRKLLTKSVF

SEQ ID NO: 272901 - protein, 15 aa, Artificial Sequence
  Description of Artificial Sequence: Synthetic peptide
  Seed: SIGKVCRTLLAKSVF
SIVKVFRKLLVKSVF

SEQ ID NO: 272902 - protein, 15 aa, Artificial Sequence
  Description of Artificial Sequence: Synthetic peptide
  Seed: SIGKVCRTLLAKSVF
SIVKVFRKLLWKSVF

SEQ ID NO: 272903 - protein, 15 aa, Artificial Sequence
  Description of Artificial Sequence: Synthetic peptide
  Seed: SIGKVCRTLLAKSVF
SIVKVFRKLLYKSVF

SEQ ID NO: 272904 - protein, 15 aa, Artificial Sequence
  Description of Artificial Sequence: Synthetic peptide
  Seed: SIGKVCRTLLAKSVF
SIVKVFRNLLAKSVF

SEQ ID NO: 272905 - protein, 15 aa, Artificial Sequence
  Description of Artificial Sequence: Synthetic peptide
  Seed: SIGKVCRTLLAKSVF
SIVKVFRNLLDKSVF

SEQ ID NO: 272906 - protein, 15 aa, Artificial Sequence
  Description of Artificial Sequence: Synthetic peptide
  Seed: SIGKVCRTLLAKSVF
SIVKVFRNLLGKSVF

SEQ ID NO: 272907 - protein, 15 aa, Artificial Sequence
  Description of Artificial Sequence: Synthetic peptide
  Seed: SIGKVCRTLLAKSVF
SIVKVFRNLLHKSVF

SEQ ID NO: 272908 - protein, 15 aa, Artificial Sequence
  Description of Artificial Sequence: Synthetic peptide
  Seed: SIGKVCRTLLAKSVF
SIVKVFRNLLSKSVF

SEQ ID NO: 272909 - protein, 15 aa, Artificial Sequence
  Description of Artificial Sequence: Synthetic peptide
  Seed: SIGKVCRTLLAKSVF
SIVKVFRPLLAKSVF

SEQ ID NO: 272910 - protein, 15 aa, Artificial Sequence
  Description of Artificial Sequence: Synthetic peptide
  Seed: SIGKVCRTLLAKSVF
SIVKVFRPLLGKSVF

SEQ ID NO: 272911 - protein, 15 aa, Artificial Sequence
  Description of Artificial Sequence: Synthetic peptide
  Seed: SIGKVCRTLLAKSVF
SIVKVFRPLLQKSVF

SEQ ID NO: 272912 - protein, 15 aa, Artificial Sequence
  Description of Artificial Sequence: Synthetic peptide
  Seed: SIGKVCRTLLAKSVF
SIVKVFRPLLSKSVF

SEQ ID NO: 272913 - protein, 15 aa, Artificial Sequence
  Description of Artificial Sequence: Synthetic peptide
  Seed: SIGKVCRTLLAKSVF
SIVKVFRQLLHKSVF

SEQ ID NO: 272914 - protein, 15 aa, Artificial Sequence
  Description of Artificial Sequence: Synthetic peptide
  Seed: SIGKVCRTLLAKSVF
SIVKVFRQLLSKSVF

SEQ ID NO: 272915 - protein, 15 aa, Artificial Sequence
  Description of Artificial Sequence: Synthetic peptide
  Seed: SIGKVCRTLLAKSVF
SIVKVFRRLLAKSVF

SEQ ID NO: 272916 - protein, 15 aa, Artificial Sequence
  Description of Artificial Sequence: Synthetic peptide
  Seed: SIGKVCRTLLAKSVF
SIVKVFRRLLCKSVF

SEQ ID NO: 272917 - protein, 15 aa, Artificial Sequence
  Description of Artificial Sequence: Synthetic peptide
  Seed: SIGKVCRTLLAKSVF
SIVKVFRRLLDKSVF

SEQ ID NO: 272918 - protein, 15 aa, Artificial Sequence
  Description of Artificial Sequence: Synthetic peptide
  Seed: SIGKVCRTLLAKSVF
SIVKVFRRLLEKSVF

SEQ ID NO: 272919 - protein, 15 aa, Artificial Sequence
  Description of Artificial Sequence: Synthetic peptide
  Seed: SIGKVCRTLLAKSVF
SIVKVFRRLLFKSVF

SEQ ID NO: 272920 - protein, 15 aa, Artificial Sequence
  Description of Artificial Sequence: Synthetic peptide
  Seed: SIGKVCRTLLAKSVF
SIVKVFRRLLGKSVF

SEQ ID NO: 272921 - protein, 15 aa, Artificial Sequence
  Description of Artificial Sequence: Synthetic peptide
  Seed: SIGKVCRTLLAKSVF
SIVKVFRRLLHKSVF

SEQ ID NO: 272922 - protein, 15 aa, Artificial Sequence
  Description of Artificial Sequence: Synthetic peptide
  Seed: SIGKVCRTLLAKSVF
SIVKVFRRLLIKSVF

SEQ ID NO: 272923 - protein, 15 aa, Artificial Sequence
  Description of Artificial Sequence: Synthetic peptide
  Seed: SIGKVCRTLLAKSVF
SIVKVFRRLLKKSVF

SEQ ID NO: 272924 - protein, 15 aa, Artificial Sequence
  Description of Artificial Sequence: Synthetic peptide
  Seed: SIGKVCRTLLAKSVF
SIVKVFRRLLLKSVF

SEQ ID NO: 272925 - protein, 15 aa, Artificial Sequence
  Description of Artificial Sequence: Synthetic peptide
  Seed: SIGKVCRTLLAKSVF
SIVKVFRRLLMKSVF

SEQ ID NO: 272926 - protein, 15 aa, Artificial Sequence
  Description of Artificial Sequence: Synthetic peptide
  Seed: SIGKVCRTLLAKSVF
SIVKVFRRLLNKSVF

SEQ ID NO: 272927 - protein, 15 aa, Artificial Sequence
  Description of Artificial Sequence: Synthetic peptide
  Seed: SIGKVCRTLLAKSVF
SIVKVFRRLLPKSVF

SEQ ID NO: 272928 - protein, 15 aa, Artificial Sequence
  Description of Artificial Sequence: Synthetic peptide
  Seed: SIGKVCRTLLAKSVF
SIVKVFRRLLQKSVF

SEQ ID NO: 272929 - protein, 15 aa, Artificial Sequence
  Description of Artificial Sequence: Synthetic peptide
  Seed: SIGKVCRTLLAKSVF
SIVKVFRRLLRKSVF

SEQ ID NO: 272930 - protein, 15 aa, Artificial Sequence
  Description of Artificial Sequence: Synthetic peptide
  Seed: SIGKVCRTLLAKSVF
SIVKVFRRLLSKSVF

SEQ ID NO: 272931 - protein, 15 aa, Artificial Sequence
  Description of Artificial Sequence: Synthetic peptide
  Seed: SIGKVCRTLLAKSVF
SIVKVFRRLLTKSVF

SEQ ID NO: 272932 - protein, 15 aa, Artificial Sequence
  Description of Artificial Sequence: Synthetic peptide
  Seed: SIGKVCRTLLAKSVF
SIVKVFRRLLVKSVF

SEQ ID NO: 272933 - protein, 15 aa, Artificial Sequence
  Description of Artificial Sequence: Synthetic peptide
  Seed: SIGKVCRTLLAKSVF
SIVKVFRRLLYKSVF

SEQ ID NO: 272934 - protein, 15 aa, Artificial Sequence
  Description of Artificial Sequence: Synthetic peptide
  Seed: SIGKVCRTLLAKSVF
SIVKVFRSLLAKSVF

SEQ ID NO: 272935 - protein, 15 aa, Artificial Sequence
  Description of Artificial Sequence: Synthetic peptide
  Seed: SIGKVCRTLLAKSVF
SIVKVFRSLLDKSVF

SEQ ID NO: 272936 - protein, 15 aa, Artificial Sequence
  Description of Artificial Sequence: Synthetic peptide
  Seed: SIGKVCRTLLAKSVF
SIVKVFRSLLGKSVF

SEQ ID NO: 272937 - protein, 15 aa, Artificial Sequence
  Description of Artificial Sequence: Synthetic peptide
  Seed: SIGKVCRTLLAKSVF
SIVKVFRSLLHKSVF

SEQ ID NO: 272938 - protein, 15 aa, Artificial Sequence
  Description of Artificial Sequence: Synthetic peptide
  Seed: SIGKVCRTLLAKSVF
SIVKVFRSLLNKSVF

SEQ ID NO: 272939 - protein, 15 aa, Artificial Sequence
  Description of Artificial Sequence: Synthetic peptide
  Seed: SIGKVCRTLLAKSVF
SIVKVFRSLLQKSVF

SEQ ID NO: 272940 - protein, 15 aa, Artificial Sequence
  Description of Artificial Sequence: Synthetic peptide
  Seed: SIGKVCRTLLAKSVF
SIVKVFRSLLRKSVF

SEQ ID NO: 272941 - protein, 15 aa, Artificial Sequence
  Description of Artificial Sequence: Synthetic peptide
  Seed: SIGKVCRTLLAKSVF
SIVKVFRSLLSKSVF

SEQ ID NO: 272942 - protein, 15 aa, Artificial Sequence
  Description of Artificial Sequence: Synthetic peptide
  Seed: SIGKVCRTLLAKSVF
SIVKVFRSLLTKSVF

SEQ ID NO: 272943 - protein, 15 aa, Artificial Sequence
  Description of Artificial Sequence: Synthetic peptide
  Seed: SIGKVCRTLLAKSVF
SIVKVFRTLLAKSVF

SEQ ID NO: 272944 - protein, 15 aa, Artificial Sequence
  Description of Artificial Sequence: Synthetic peptide
  Seed: SIGKVCRTLLAKSVF
SIVKVFRTLLDKSVF

SEQ ID NO: 272945 - protein, 15 aa, Artificial Sequence
  Description of Artificial Sequence: Synthetic peptide
  Seed: SIGKVCRTLLAKSVF
SIVKVFRTLLGKSVF

SEQ ID NO: 272946 - protein, 15 aa, Artificial Sequence
  Description of Artificial Sequence: Synthetic peptide
  Seed: SIGKVCRTLLAKSVF
SIVKVFRTLLHKSVF

SEQ ID NO: 272947 - protein, 15 aa, Artificial Sequence
  Description of Artificial Sequence: Synthetic peptide
  Seed: SIGKVCRTLLAKSVF
SIVKVFRTLLQKSVF

SEQ ID NO: 272948 - protein, 15 aa, Artificial Sequence
  Description of Artificial Sequence: Synthetic peptide
  Seed: SIGKVCRTLLAKSVF
SIVKVFRTLLRKSVF

SEQ ID NO: 272949 - protein, 15 aa, Artificial Sequence
  Description of Artificial Sequence: Synthetic peptide
  Seed: SIGKVCRTLLAKSVF
SIVKVFRTLLSKSVF

SEQ ID NO: 272950 - protein, 15 aa, Artificial Sequence
  Description of Artificial Sequence: Synthetic peptide
  Seed: SIGKVCRTLLAKSVF
SIVKVFRTLLTKSVF

SEQ ID NO: 272951 - protein, 15 aa, Artificial Sequence
  Description of Artificial Sequence: Synthetic peptide
  Seed: SIGKVCRTLLAKSVF
SIVKVFRVLLHKSVF

SEQ ID NO: 272952 - protein, 15 aa, Artificial Sequence
  Description of Artificial Sequence: Synthetic peptide
  Seed: SIGKVCRTLLAKSVF
SIVKVGRKLLAKSVF

SEQ ID NO: 272953 - protein, 15 aa, Artificial Sequence
  Description of Artificial Sequence: Synthetic peptide
  Seed: SIGKVCRTLLAKSVF
SIVKVGRKLLCKSVF

SEQ ID NO: 272954 - protein, 15 aa, Artificial Sequence
  Description of Artificial Sequence: Synthetic peptide
  Seed: SIGKVCRTLLAKSVF
SIVKVGRKLLEKSVF

SEQ ID NO: 272955 - protein, 15 aa, Artificial Sequence
  Description of Artificial Sequence: Synthetic peptide
  Seed: SIGKVCRTLLAKSVF
SIVKVGRKLLGKSVF

SEQ ID NO: 272956 - protein, 15 aa, Artificial Sequence
  Description of Artificial Sequence: Synthetic peptide
  Seed: SIGKVCRTLLAKSVF
SIVKVGRKLLHKSVF

SEQ ID NO: 272957 - protein, 15 aa, Artificial Sequence
  Description of Artificial Sequence: Synthetic peptide
  Seed: SIGKVCRTLLAKSVF
SIVKVGRKLLIKSVF

SEQ ID NO: 272958 - protein, 15 aa, Artificial Sequence
  Description of Artificial Sequence: Synthetic peptide
  Seed: SIGKVCRTLLAKSVF
SIVKVGRKLLLKSVF

SEQ ID NO: 272959 - protein, 15 aa, Artificial Sequence
  Description of Artificial Sequence: Synthetic peptide
  Seed: SIGKVCRTLLAKSVF
SIVKVGRKLLMKSVF

SEQ ID NO: 272960 - protein, 15 aa, Artificial Sequence
  Description of Artificial Sequence: Synthetic peptide
  Seed: SIGKVCRTLLAKSVF
SIVKVGRKLLNKSVF

SEQ ID NO: 272961 - protein, 15 aa, Artificial Sequence
  Description of Artificial Sequence: Synthetic peptide
  Seed: SIGKVCRTLLAKSVF
SIVKVGRKLLQKSVF

SEQ ID NO: 272962 - protein, 15 aa, Artificial Sequence
  Description of Artificial Sequence: Synthetic peptide
  Seed: SIGKVCRTLLAKSVF
SIVKVGRKLLSKSVF

SEQ ID NO: 272963 - protein, 15 aa, Artificial Sequence
  Description of Artificial Sequence: Synthetic peptide
  Seed: SIGKVCRTLLAKSVF
SIVKVGRKLLTKSVF

SEQ ID NO: 272964 - protein, 15 aa, Artificial Sequence
  Description of Artificial Sequence: Synthetic peptide
  Seed: SIGKVCRTLLAKSVF
SIVKVGRKLLVKSVF

SEQ ID NO: 272965 - protein, 15 aa, Artificial Sequence
  Description of Artificial Sequence: Synthetic peptide
  Seed: SIGKVCRTLLAKSVF
SIVKVGRKLLYKSVF

SEQ ID NO: 272966 - protein, 15 aa, Artificial Sequence
  Description of Artificial Sequence: Synthetic peptide
  Seed: SIGKVCRTLLAKSVF
SIVKVGRRLLAKSVF

SEQ ID NO: 272967 - protein, 15 aa, Artificial Sequence
  Description of Artificial Sequence: Synthetic peptide
  Seed: SIGKVCRTLLAKSVF
SIVKVGRRLLCKSVF

SEQ ID NO: 272968 - protein, 15 aa, Artificial Sequence
  Description of Artificial Sequence: Synthetic peptide
  Seed: SIGKVCRTLLAKSVF
SIVKVGRRLLEKSVF

SEQ ID NO: 272969 - protein, 15 aa, Artificial Sequence
  Description of Artificial Sequence: Synthetic peptide
  Seed: SIGKVCRTLLAKSVF
SIVKVGRRLLGKSVF

SEQ ID NO: 272970 - protein, 15 aa, Artificial Sequence
  Description of Artificial Sequence: Synthetic peptide
  Seed: SIGKVCRTLLAKSVF
SIVKVGRRLLHKSVF

SEQ ID NO: 272971 - protein, 15 aa, Artificial Sequence
  Description of Artificial Sequence: Synthetic peptide
  Seed: SIGKVCRTLLAKSVF
SIVKVGRRLLLKSVF

SEQ ID NO: 272972 - protein, 15 aa, Artificial Sequence
  Description of Artificial Sequence: Synthetic peptide
  Seed: SIGKVCRTLLAKSVF
SIVKVGRRLLMKSVF

SEQ ID NO: 272973 - protein, 15 aa, Artificial Sequence
  Description of Artificial Sequence: Synthetic peptide
  Seed: SIGKVCRTLLAKSVF
SIVKVGRRLLNKSVF

SEQ ID NO: 272974 - protein, 15 aa, Artificial Sequence
  Description of Artificial Sequence: Synthetic peptide
  Seed: SIGKVCRTLLAKSVF
SIVKVGRRLLQKSVF

SEQ ID NO: 272975 - protein, 15 aa, Artificial Sequence
  Description of Artificial Sequence: Synthetic peptide
  Seed: SIGKVCRTLLAKSVF
SIVKVGRRLLSKSVF

SEQ ID NO: 272976 - protein, 15 aa, Artificial Sequence
  Description of Artificial Sequence: Synthetic peptide
  Seed: SIGKVCRTLLAKSVF
SIVKVGRRLLTKSVF

SEQ ID NO: 272977 - protein, 15 aa, Artificial Sequence
  Description of Artificial Sequence: Synthetic peptide
  Seed: SIGKVCRTLLAKSVF
SIVKVGRRLLVKSVF

SEQ ID NO: 272978 - protein, 15 aa, Artificial Sequence
  Description of Artificial Sequence: Synthetic peptide
  Seed: SIGKVCRTLLAKSVF
SIVKVHRHLLGKSVF

SEQ ID NO: 272979 - protein, 15 aa, Artificial Sequence
  Description of Artificial Sequence: Synthetic peptide
  Seed: SIGKVCRTLLAKSVF
SIVKVHRHLLQKSVF

SEQ ID NO: 272980 - protein, 15 aa, Artificial Sequence
  Description of Artificial Sequence: Synthetic peptide
  Seed: SIGKVCRTLLAKSVF
SIVKVHRKLLAKSVF

SEQ ID NO: 272981 - protein, 15 aa, Artificial Sequence
  Description of Artificial Sequence: Synthetic peptide
  Seed: SIGKVCRTLLAKSVF
SIVKVHRKLLCKSVF

SEQ ID NO: 272982 - protein, 15 aa, Artificial Sequence
  Description of Artificial Sequence: Synthetic peptide
  Seed: SIGKVCRTLLAKSVF
SIVKVHRKLLDKSVF

SEQ ID NO: 272983 - protein, 15 aa, Artificial Sequence
  Description of Artificial Sequence: Synthetic peptide
  Seed: SIGKVCRTLLAKSVF
SIVKVHRKLLEKSVF

SEQ ID NO: 272984 - protein, 15 aa, Artificial Sequence
  Description of Artificial Sequence: Synthetic peptide
  Seed: SIGKVCRTLLAKSVF
SIVKVHRKLLFKSVF

SEQ ID NO: 272985 - protein, 15 aa, Artificial Sequence
  Description of Artificial Sequence: Synthetic peptide
  Seed: SIGKVCRTLLAKSVF
SIVKVHRKLLGKSVF

SEQ ID NO: 272986 - protein, 15 aa, Artificial Sequence
  Description of Artificial Sequence: Synthetic peptide
  Seed: SIGKVCRTLLAKSVF
SIVKVHRKLLHKSVF

SEQ ID NO: 272987 - protein, 15 aa, Artificial Sequence
  Description of Artificial Sequence: Synthetic peptide
  Seed: SIGKVCRTLLAKSVF
SIVKVHRKLLIKSVF

SEQ ID NO: 272988 - protein, 15 aa, Artificial Sequence
  Description of Artificial Sequence: Synthetic peptide
  Seed: SIGKVCRTLLAKSVF
SIVKVHRKLLLKSVF

SEQ ID NO: 272989 - protein, 15 aa, Artificial Sequence
  Description of Artificial Sequence: Synthetic peptide
  Seed: SIGKVCRTLLAKSVF
SIVKVHRKLLMKSVF

SEQ ID NO: 272990 - protein, 15 aa, Artificial Sequence
  Description of Artificial Sequence: Synthetic peptide
  Seed: SIGKVCRTLLAKSVF
SIVKVHRKLLNKSVF

SEQ ID NO: 272991 - protein, 15 aa, Artificial Sequence
  Description of Artificial Sequence: Synthetic peptide
  Seed: SIGKVCRTLLAKSVF
SIVKVHRKLLQKSVF

SEQ ID NO: 272992 - protein, 15 aa, Artificial Sequence
  Description of Artificial Sequence: Synthetic peptide
  Seed: SIGKVCRTLLAKSVF
SIVKVHRKLLRKSVF

SEQ ID NO: 272993 - protein, 15 aa, Artificial Sequence
  Description of Artificial Sequence: Synthetic peptide
  Seed: SIGKVCRTLLAKSVF
SIVKVHRKLLSKSVF

SEQ ID NO: 272994 - protein, 15 aa, Artificial Sequence
  Description of Artificial Sequence: Synthetic peptide
  Seed: SIGKVCRTLLAKSVF
SIVKVHRKLLTKSVF

SEQ ID NO: 272995 - protein, 15 aa, Artificial Sequence
  Description of Artificial Sequence: Synthetic peptide
  Seed: SIGKVCRTLLAKSVF
SIVKVHRKLLVKSVF

SEQ ID NO: 272996 - protein, 15 aa, Artificial Sequence
  Description of Artificial Sequence: Synthetic peptide
  Seed: SIGKVCRTLLAKSVF
SIVKVHRKLLYKSVF

SEQ ID NO: 272997 - protein, 15 aa, Artificial Sequence
  Description of Artificial Sequence: Synthetic peptide
  Seed: SIGKVCRTLLAKSVF
SIVKVHRNLLGKSVF

SEQ ID NO: 272998 - protein, 15 aa, Artificial Sequence
  Description of Artificial Sequence: Synthetic peptide
  Seed: SIGKVCRTLLAKSVF
SIVKVHRQLLQKSVF

SEQ ID NO: 272999 - protein, 15 aa, Artificial Sequence
  Description of Artificial Sequence: Synthetic peptide
  Seed: SIGKVCRTLLAKSVF
SIVKVHRRLLAKSVF

SEQ ID NO: 273000 - protein, 15 aa, Artificial Sequence
  Description of Artificial Sequence: Synthetic peptide
  Seed: SIGKVCRTLLAKSVF
SIVKVHRRLLCKSVF

SEQ ID NO: 273001 - protein, 15 aa, Artificial Sequence
  Description of Artificial Sequence: Synthetic peptide
  Seed: SIGKVCRTLLAKSVF
SIVKVHRRLLDKSVF

SEQ ID NO: 273002 - protein, 15 aa, Artificial Sequence
  Description of Artificial Sequence: Synthetic peptide
  Seed: SIGKVCRTLLAKSVF
SIVKVHRRLLEKSVF

SEQ ID NO: 273003 - protein, 15 aa, Artificial Sequence
  Description of Artificial Sequence: Synthetic peptide
  Seed: SIGKVCRTLLAKSVF
SIVKVHRRLLFKSVF

SEQ ID NO: 273004 - protein, 15 aa, Artificial Sequence
  Description of Artificial Sequence: Synthetic peptide
  Seed: SIGKVCRTLLAKSVF
SIVKVHRRLLGKSVF

SEQ ID NO: 273005 - protein, 15 aa, Artificial Sequence
  Description of Artificial Sequence: Synthetic peptide
  Seed: SIGKVCRTLLAKSVF
SIVKVHRRLLHKSVF

SEQ ID NO: 273006 - protein, 15 aa, Artificial Sequence
  Description of Artificial Sequence: Synthetic peptide
  Seed: SIGKVCRTLLAKSVF
SIVKVHRRLLIKSVF

SEQ ID NO: 273007 - protein, 15 aa, Artificial Sequence
  Description of Artificial Sequence: Synthetic peptide
  Seed: SIGKVCRTLLAKSVF
SIVKVHRRLLLKSVF

SEQ ID NO: 273008 - protein, 15 aa, Artificial Sequence
  Description of Artificial Sequence: Synthetic peptide
  Seed: SIGKVCRTLLAKSVF
SIVKVHRRLLMKSVF

SEQ ID NO: 273009 - protein, 15 aa, Artificial Sequence
  Description of Artificial Sequence: Synthetic peptide
  Seed: SIGKVCRTLLAKSVF
SIVKVHRRLLNKSVF

SEQ ID NO: 273010 - protein, 15 aa, Artificial Sequence
  Description of Artificial Sequence: Synthetic peptide
  Seed: SIGKVCRTLLAKSVF
SIVKVHRRLLQKSVF

SEQ ID NO: 273011 - protein, 15 aa, Artificial Sequence
  Description of Artificial Sequence: Synthetic peptide
  Seed: SIGKVCRTLLAKSVF
SIVKVHRRLLSKSVF

SEQ ID NO: 273012 - protein, 15 aa, Artificial Sequence
  Description of Artificial Sequence: Synthetic peptide
  Seed: SIGKVCRTLLAKSVF
SIVKVHRRLLTKSVF

SEQ ID NO: 273013 - protein, 15 aa, Artificial Sequence
  Description of Artificial Sequence: Synthetic peptide
  Seed: SIGKVCRTLLAKSVF
SIVKVHRRLLVKSVF

SEQ ID NO: 273014 - protein, 15 aa, Artificial Sequence
  Description of Artificial Sequence: Synthetic peptide
  Seed: SIGKVCRTLLAKSVF
SIVKVHRRLLYKSVF

SEQ ID NO: 273015 - protein, 15 aa, Artificial Sequence
  Description of Artificial Sequence: Synthetic peptide
  Seed: SIGKVCRTLLAKSVF
SIVKVHRSLLAKSVF

SEQ ID NO: 273016 - protein, 15 aa, Artificial Sequence
  Description of Artificial Sequence: Synthetic peptide
  Seed: SIGKVCRTLLAKSVF
SIVKVHRSLLGKSVF

SEQ ID NO: 273017 - protein, 15 aa, Artificial Sequence
  Description of Artificial Sequence: Synthetic peptide
  Seed: SIGKVCRTLLAKSVF
SIVKVHRSLLQKSVF

SEQ ID NO: 273018 - protein, 15 aa, Artificial Sequence
  Description of Artificial Sequence: Synthetic peptide
  Seed: SIGKVCRTLLAKSVF
SIVKVHRSLLRKSVF

SEQ ID NO: 273019 - protein, 15 aa, Artificial Sequence
  Description of Artificial Sequence: Synthetic peptide
  Seed: SIGKVCRTLLAKSVF
SIVKVHRSLLSKSVF

SEQ ID NO: 273020 - protein, 15 aa, Artificial Sequence
  Description of Artificial Sequence: Synthetic peptide
  Seed: SIGKVCRTLLAKSVF
SIVKVHRSLLYKSVF

SEQ ID NO: 273021 - protein, 15 aa, Artificial Sequence
  Description of Artificial Sequence: Synthetic peptide
  Seed: SIGKVCRTLLAKSVF
SIVKVHRTLLAKSVF

SEQ ID NO: 273022 - protein, 15 aa, Artificial Sequence
  Description of Artificial Sequence: Synthetic peptide
  Seed: SIGKVCRTLLAKSVF
SIVKVHRTLLGKSVF

SEQ ID NO: 273023 - protein, 15 aa, Artificial Sequence
  Description of Artificial Sequence: Synthetic peptide
  Seed: SIGKVCRTLLAKSVF
SIVKVHRTLLQKSVF

SEQ ID NO: 273024 - protein, 15 aa, Artificial Sequence
  Description of Artificial Sequence: Synthetic peptide
  Seed: SIGKVCRTLLAKSVF
SIVKVHRTLLRKSVF

SEQ ID NO: 273025 - protein, 15 aa, Artificial Sequence
  Description of Artificial Sequence: Synthetic peptide
  Seed: SIGKVCRTLLAKSVF
SIVKVHRTLLSKSVF

SEQ ID NO: 273026 - protein, 15 aa, Artificial Sequence
  Description of Artificial Sequence: Synthetic peptide
  Seed: SIGKVCRTLLAKSVF
SIVKVHRTLLYKSVF

SEQ ID NO: 273027 - protein, 15 aa, Artificial Sequence
  Description of Artificial Sequence: Synthetic peptide
  Seed: SIGKVCRTLLAKSVF
SIVKVHRVLLGKSVF

SEQ ID NO: 273028 - protein, 15 aa, Artificial Sequence
  Description of Artificial Sequence: Synthetic peptide
  Seed: SIGKVCRTLLAKSVF
SIVKVHRVLLQKSVF

SEQ ID NO: 273029 - protein, 15 aa, Artificial Sequence
  Description of Artificial Sequence: Synthetic peptide
  Seed: SIGKVCRTLLAKSVF
SIVKVIRALLAKSVF

SEQ ID NO: 273030 - protein, 15 aa, Artificial Sequence
  Description of Artificial Sequence: Synthetic peptide
  Seed: SIGKVCRTLLAKSVF
SIVKVIRALLGKSVF

SEQ ID NO: 273031 - protein, 15 aa, Artificial Sequence
  Description of Artificial Sequence: Synthetic peptide
  Seed: SIGKVCRTLLAKSVF
SIVKVIRALLHKSVF

SEQ ID NO: 273032 - protein, 15 aa, Artificial Sequence
  Description of Artificial Sequence: Synthetic peptide
  Seed: SIGKVCRTLLAKSVF
SIVKVIRALLNKSVF

SEQ ID NO: 273033 - protein, 15 aa, Artificial Sequence
  Description of Artificial Sequence: Synthetic peptide
  Seed: SIGKVCRTLLAKSVF
SIVKVIRALLQKSVF

SEQ ID NO: 273034 - protein, 15 aa, Artificial Sequence
  Description of Artificial Sequence: Synthetic peptide
  Seed: SIGKVCRTLLAKSVF
SIVKVIRALLSKSVF

SEQ ID NO: 273035 - protein, 15 aa, Artificial Sequence
  Description of Artificial Sequence: Synthetic peptide
  Seed: SIGKVCRTLLAKSVF
SIVKVIRALLVKSVF

SEQ ID NO: 273036 - protein, 15 aa, Artificial Sequence
  Description of Artificial Sequence: Synthetic peptide
  Seed: SIGKVCRTLLAKSVF
SIVKVIRALLYKSVF

SEQ ID NO: 273037 - protein, 15 aa, Artificial Sequence
  Description of Artificial Sequence: Synthetic peptide
  Seed: SIGKVCRTLLAKSVF
SIVKVIRDLLAKSVF

SEQ ID NO: 273038 - protein, 15 aa, Artificial Sequence
  Description of Artificial Sequence: Synthetic peptide
  Seed: SIGKVCRTLLAKSVF
SIVKVIRGLLAKSVF

SEQ ID NO: 273039 - protein, 15 aa, Artificial Sequence
  Description of Artificial Sequence: Synthetic peptide
  Seed: SIGKVCRTLLAKSVF
SIVKVIRGLLGKSVF

SEQ ID NO: 273040 - protein, 15 aa, Artificial Sequence
  Description of Artificial Sequence: Synthetic peptide
  Seed: SIGKVCRTLLAKSVF
SIVKVIRGLLQKSVF

SEQ ID NO: 273041 - protein, 15 aa, Artificial Sequence
  Description of Artificial Sequence: Synthetic peptide
  Seed: SIGKVCRTLLAKSVF
SIVKVIRGLLSKSVF

SEQ ID NO: 273042 - protein, 15 aa, Artificial Sequence
  Description of Artificial Sequence: Synthetic peptide
  Seed: SIGKVCRTLLAKSVF
SIVKVIRHLLAKSVF

SEQ ID NO: 273043 - protein, 15 aa, Artificial Sequence
  Description of Artificial Sequence: Synthetic peptide
  Seed: SIGKVCRTLLAKSVF
SIVKVIRHLLEKSVF

SEQ ID NO: 273044 - protein, 15 aa, Artificial Sequence
  Description of Artificial Sequence: Synthetic peptide
  Seed: SIGKVCRTLLAKSVF
SIVKVIRHLLGKSVF

SEQ ID NO: 273045 - protein, 15 aa, Artificial Sequence
  Description of Artificial Sequence: Synthetic peptide
  Seed: SIGKVCRTLLAKSVF
SIVKVIRHLLHKSVF

SEQ ID NO: 273046 - protein, 15 aa, Artificial Sequence
  Description of Artificial Sequence: Synthetic peptide
  Seed: SIGKVCRTLLAKSVF
SIVKVIRHLLIKSVF

SEQ ID NO: 273047 - protein, 15 aa, Artificial Sequence
  Description of Artificial Sequence: Synthetic peptide
  Seed: SIGKVCRTLLAKSVF
SIVKVIRHLLLKSVF

SEQ ID NO: 273048 - protein, 15 aa, Artificial Sequence
  Description of Artificial Sequence: Synthetic peptide
  Seed: SIGKVCRTLLAKSVF
SIVKVIRHLLMKSVF

SEQ ID NO: 273049 - protein, 15 aa, Artificial Sequence
  Description of Artificial Sequence: Synthetic peptide
  Seed: SIGKVCRTLLAKSVF
SIVKVIRHLLNKSVF

SEQ ID NO: 273050 - protein, 15 aa, Artificial Sequence
  Description of Artificial Sequence: Synthetic peptide
  Seed: SIGKVCRTLLAKSVF
SIVKVIRHLLPKSVF

SEQ ID NO: 273051 - protein, 15 aa, Artificial Sequence
  Description of Artificial Sequence: Synthetic peptide
  Seed: SIGKVCRTLLAKSVF
SIVKVIRHLLQKSVF

SEQ ID NO: 273052 - protein, 15 aa, Artificial Sequence
  Description of Artificial Sequence: Synthetic peptide
  Seed: SIGKVCRTLLAKSVF
SIVKVIRHLLRKSVF

SEQ ID NO: 273053 - protein, 15 aa, Artificial Sequence
  Description of Artificial Sequence: Synthetic peptide
  Seed: SIGKVCRTLLAKSVF
SIVKVIRHLLSKSVF

SEQ ID NO: 273054 - protein, 15 aa, Artificial Sequence
  Description of Artificial Sequence: Synthetic peptide
  Seed: SIGKVCRTLLAKSVF
SIVKVIRHLLTKSVF

SEQ ID NO: 273055 - protein, 15 aa, Artificial Sequence
  Description of Artificial Sequence: Synthetic peptide
  Seed: SIGKVCRTLLAKSVF
SIVKVIRHLLVKSVF

SEQ ID NO: 273056 - protein, 15 aa, Artificial Sequence
  Description of Artificial Sequence: Synthetic peptide
  Seed: SIGKVCRTLLAKSVF
SIVKVIRHLLYKSVF

SEQ ID NO: 273057 - protein, 15 aa, Artificial Sequence
  Description of Artificial Sequence: Synthetic peptide
  Seed: SIGKVCRTLLAKSVF
SIVKVIRKLLAKSVF

SEQ ID NO: 273058 - protein, 15 aa, Artificial Sequence
  Description of Artificial Sequence: Synthetic peptide
  Seed: SIGKVCRTLLAKSVF
SIVKVIRKLLCKSVF

SEQ ID NO: 273059 - protein, 15 aa, Artificial Sequence
  Description of Artificial Sequence: Synthetic peptide
  Seed: SIGKVCRTLLAKSVF
SIVKVIRKLLDKSVF

SEQ ID NO: 273060 - protein, 15 aa, Artificial Sequence
  Description of Artificial Sequence: Synthetic peptide
  Seed: SIGKVCRTLLAKSVF
SIVKVIRKLLEKSVF

SEQ ID NO: 273061 - protein, 15 aa, Artificial Sequence
  Description of Artificial Sequence: Synthetic peptide
  Seed: SIGKVCRTLLAKSVF
SIVKVIRKLLFKSVF

SEQ ID NO: 273062 - protein, 15 aa, Artificial Sequence
  Description of Artificial Sequence: Synthetic peptide
  Seed: SIGKVCRTLLAKSVF
SIVKVIRKLLGKSVF

SEQ ID NO: 273063 - protein, 15 aa, Artificial Sequence
  Description of Artificial Sequence: Synthetic peptide
  Seed: SIGKVCRTLLAKSVF
SIVKVIRKLLHKSVF

SEQ ID NO: 273064 - protein, 15 aa, Artificial Sequence
  Description of Artificial Sequence: Synthetic peptide
  Seed: SIGKVCRTLLAKSVF
SIVKVIRKLLIKSVF

SEQ ID NO: 273065 - protein, 15 aa, Artificial Sequence
  Description of Artificial Sequence: Synthetic peptide
  Seed: SIGKVCRTLLAKSVF
SIVKVIRKLLKKSVF

SEQ ID NO: 273066 - protein, 15 aa, Artificial Sequence
  Description of Artificial Sequence: Synthetic peptide
  Seed: SIGKVCRTLLAKSVF
SIVKVIRKLLLKSVF

SEQ ID NO: 273067 - protein, 15 aa, Artificial Sequence
  Description of Artificial Sequence: Synthetic peptide
  Seed: SIGKVCRTLLAKSVF
SIVKVIRKLLMKSVF

SEQ ID NO: 273068 - protein, 15 aa, Artificial Sequence
  Description of Artificial Sequence: Synthetic peptide
  Seed: SIGKVCRTLLAKSVF
SIVKVIRKLLNKSVF

SEQ ID NO: 273069 - protein, 15 aa, Artificial Sequence
  Description of Artificial Sequence: Synthetic peptide
  Seed: SIGKVCRTLLAKSVF
SIVKVIRKLLPKSVF

SEQ ID NO: 273070 - protein, 15 aa, Artificial Sequence
  Description of Artificial Sequence: Synthetic peptide
  Seed: SIGKVCRTLLAKSVF
SIVKVIRKLLQKSVF

SEQ ID NO: 273071 - protein, 15 aa, Artificial Sequence
  Description of Artificial Sequence: Synthetic peptide
  Seed: SIGKVCRTLLAKSVF
SIVKVIRKLLRKSVF

SEQ ID NO: 273072 - protein, 15 aa, Artificial Sequence
  Description of Artificial Sequence: Synthetic peptide
  Seed: SIGKVCRTLLAKSVF
SIVKVIRKLLSKSVF

SEQ ID NO: 273073 - protein, 15 aa, Artificial Sequence
  Description of Artificial Sequence: Synthetic peptide
  Seed: SIGKVCRTLLAKSVF
SIVKVIRKLLTKSVF

SEQ ID NO: 273074 - protein, 15 aa, Artificial Sequence
  Description of Artificial Sequence: Synthetic peptide
  Seed: SIGKVCRTLLAKSVF
SIVKVIRKLLVKSVF

SEQ ID NO: 273075 - protein, 15 aa, Artificial Sequence
  Description of Artificial Sequence: Synthetic peptide
  Seed: SIGKVCRTLLAKSVF
SIVKVIRKLLWKSVF

SEQ ID NO: 273076 - protein, 15 aa, Artificial Sequence
  Description of Artificial Sequence: Synthetic peptide
  Seed: SIGKVCRTLLAKSVF
SIVKVIRKLLYKSVF

SEQ ID NO: 273077 - protein, 15 aa, Artificial Sequence
  Description of Artificial Sequence: Synthetic peptide
  Seed: SIGKVCRTLLAKSVF
SIVKVIRNLLAKSVF

SEQ ID NO: 273078 - protein, 15 aa, Artificial Sequence
  Description of Artificial Sequence: Synthetic peptide
  Seed: SIGKVCRTLLAKSVF
SIVKVIRNLLDKSVF

SEQ ID NO: 273079 - protein, 15 aa, Artificial Sequence
  Description of Artificial Sequence: Synthetic peptide
  Seed: SIGKVCRTLLAKSVF
SIVKVIRNLLEKSVF

SEQ ID NO: 273080 - protein, 15 aa, Artificial Sequence
  Description of Artificial Sequence: Synthetic peptide
  Seed: SIGKVCRTLLAKSVF
SIVKVIRNLLGKSVF

SEQ ID NO: 273081 - protein, 15 aa, Artificial Sequence
  Description of Artificial Sequence: Synthetic peptide
  Seed: SIGKVCRTLLAKSVF
SIVKVIRNLLHKSVF

SEQ ID NO: 273082 - protein, 15 aa, Artificial Sequence
  Description of Artificial Sequence: Synthetic peptide
  Seed: SIGKVCRTLLAKSVF
SIVKVIRNLLNKSVF

SEQ ID NO: 273083 - protein, 15 aa, Artificial Sequence
  Description of Artificial Sequence: Synthetic peptide
  Seed: SIGKVCRTLLAKSVF
SIVKVIRNLLQKSVF

SEQ ID NO: 273084 - protein, 15 aa, Artificial Sequence
  Description of Artificial Sequence: Synthetic peptide
  Seed: SIGKVCRTLLAKSVF
SIVKVIRNLLSKSVF

SEQ ID NO: 273085 - protein, 15 aa, Artificial Sequence
  Description of Artificial Sequence: Synthetic peptide
  Seed: SIGKVCRTLLAKSVF
SIVKVIRNLLTKSVF

SEQ ID NO: 273086 - protein, 15 aa, Artificial Sequence
  Description of Artificial Sequence: Synthetic peptide
  Seed: SIGKVCRTLLAKSVF
SIVKVIRNLLVKSVF

SEQ ID NO: 273087 - protein, 15 aa, Artificial Sequence
  Description of Artificial Sequence: Synthetic peptide
  Seed: SIGKVCRTLLAKSVF
SIVKVIRNLLYKSVF

SEQ ID NO: 273088 - protein, 15 aa, Artificial Sequence
  Description of Artificial Sequence: Synthetic peptide
  Seed: SIGKVCRTLLAKSVF
SIVKVIRPLLAKSVF

SEQ ID NO: 273089 - protein, 15 aa, Artificial Sequence
  Description of Artificial Sequence: Synthetic peptide
  Seed: SIGKVCRTLLAKSVF
SIVKVIRPLLGKSVF

SEQ ID NO: 273090 - protein, 15 aa, Artificial Sequence
  Description of Artificial Sequence: Synthetic peptide
  Seed: SIGKVCRTLLAKSVF
SIVKVIRPLLMKSVF

SEQ ID NO: 273091 - protein, 15 aa, Artificial Sequence
  Description of Artificial Sequence: Synthetic peptide
  Seed: SIGKVCRTLLAKSVF
SIVKVIRPLLQKSVF

SEQ ID NO: 273092 - protein, 15 aa, Artificial Sequence
  Description of Artificial Sequence: Synthetic peptide
  Seed: SIGKVCRTLLAKSVF
SIVKVIRPLLSKSVF

SEQ ID NO: 273093 - protein, 15 aa, Artificial Sequence
  Description of Artificial Sequence: Synthetic peptide
  Seed: SIGKVCRTLLAKSVF
SIVKVIRPLLVKSVF

SEQ ID NO: 273094 - protein, 15 aa, Artificial Sequence
  Description of Artificial Sequence: Synthetic peptide
  Seed: SIGKVCRTLLAKSVF
SIVKVIRQLLAKSVF

SEQ ID NO: 273095 - protein, 15 aa, Artificial Sequence
  Description of Artificial Sequence: Synthetic peptide
  Seed: SIGKVCRTLLAKSVF
SIVKVIRQLLGKSVF

SEQ ID NO: 273096 - protein, 15 aa, Artificial Sequence
  Description of Artificial Sequence: Synthetic peptide
  Seed: SIGKVCRTLLAKSVF
SIVKVIRQLLHKSVF

SEQ ID NO: 273097 - protein, 15 aa, Artificial Sequence
  Description of Artificial Sequence: Synthetic peptide
  Seed: SIGKVCRTLLAKSVF
SIVKVIRQLLNKSVF

SEQ ID NO: 273098 - protein, 15 aa, Artificial Sequence
  Description of Artificial Sequence: Synthetic peptide
  Seed: SIGKVCRTLLAKSVF
SIVKVIRQLLQKSVF

SEQ ID NO: 273099 - protein, 15 aa, Artificial Sequence
  Description of Artificial Sequence: Synthetic peptide
  Seed: SIGKVCRTLLAKSVF
SIVKVIRQLLSKSVF

SEQ ID NO: 273100 - protein, 15 aa, Artificial Sequence
  Description of Artificial Sequence: Synthetic peptide
  Seed: SIGKVCRTLLAKSVF
SIVKVIRQLLTKSVF

SEQ ID NO: 273101 - protein, 15 aa, Artificial Sequence
  Description of Artificial Sequence: Synthetic peptide
  Seed: SIGKVCRTLLAKSVF
SIVKVIRRLLAKSVF

SEQ ID NO: 273102 - protein, 15 aa, Artificial Sequence
  Description of Artificial Sequence: Synthetic peptide
  Seed: SIGKVCRTLLAKSVF
SIVKVIRRLLCKSVF

SEQ ID NO: 273103 - protein, 15 aa, Artificial Sequence
  Description of Artificial Sequence: Synthetic peptide
  Seed: SIGKVCRTLLAKSVF
SIVKVIRRLLDKSVF

SEQ ID NO: 273104 - protein, 15 aa, Artificial Sequence
  Description of Artificial Sequence: Synthetic peptide
  Seed: SIGKVCRTLLAKSVF
SIVKVIRRLLEKSVF

SEQ ID NO: 273105 - protein, 15 aa, Artificial Sequence
  Description of Artificial Sequence: Synthetic peptide
  Seed: SIGKVCRTLLAKSVF
SIVKVIRRLLFKSVF

SEQ ID NO: 273106 - protein, 15 aa, Artificial Sequence
  Description of Artificial Sequence: Synthetic peptide
  Seed: SIGKVCRTLLAKSVF
SIVKVIRRLLGKSVF

SEQ ID NO: 273107 - protein, 15 aa, Artificial Sequence
  Description of Artificial Sequence: Synthetic peptide
  Seed: SIGKVCRTLLAKSVF
SIVKVIRRLLHKSVF

SEQ ID NO: 273108 - protein, 15 aa, Artificial Sequence
  Description of Artificial Sequence: Synthetic peptide
  Seed: SIGKVCRTLLAKSVF
SIVKVIRRLLIKSVF

SEQ ID NO: 273109 - protein, 15 aa, Artificial Sequence
  Description of Artificial Sequence: Synthetic peptide
  Seed: SIGKVCRTLLAKSVF
SIVKVIRRLLKKSVF

SEQ ID NO: 273110 - protein, 15 aa, Artificial Sequence
  Description of Artificial Sequence: Synthetic peptide
  Seed: SIGKVCRTLLAKSVF
SIVKVIRRLLLKSVF

SEQ ID NO: 273111 - protein, 15 aa, Artificial Sequence
  Description of Artificial Sequence: Synthetic peptide
  Seed: SIGKVCRTLLAKSVF
SIVKVIRRLLMKSVF

SEQ ID NO: 273112 - protein, 15 aa, Artificial Sequence
  Description of Artificial Sequence: Synthetic peptide
  Seed: SIGKVCRTLLAKSVF
SIVKVIRRLLNKSVF

SEQ ID NO: 273113 - protein, 15 aa, Artificial Sequence
  Description of Artificial Sequence: Synthetic peptide
  Seed: SIGKVCRTLLAKSVF
SIVKVIRRLLPKSVF

SEQ ID NO: 273114 - protein, 15 aa, Artificial Sequence
  Description of Artificial Sequence: Synthetic peptide
  Seed: SIGKVCRTLLAKSVF
SIVKVIRRLLQKSVF

SEQ ID NO: 273115 - protein, 15 aa, Artificial Sequence
  Description of Artificial Sequence: Synthetic peptide
  Seed: SIGKVCRTLLAKSVF
SIVKVIRRLLRKSVF

SEQ ID NO: 273116 - protein, 15 aa, Artificial Sequence
  Description of Artificial Sequence: Synthetic peptide
  Seed: SIGKVCRTLLAKSVF
SIVKVIRRLLSKSVF

SEQ ID NO: 273117 - protein, 15 aa, Artificial Sequence
  Description of Artificial Sequence: Synthetic peptide
  Seed: SIGKVCRTLLAKSVF
SIVKVIRRLLTKSVF

SEQ ID NO: 273118 - protein, 15 aa, Artificial Sequence
  Description of Artificial Sequence: Synthetic peptide
  Seed: SIGKVCRTLLAKSVF
SIVKVIRRLLVKSVF

SEQ ID NO: 273119 - protein, 15 aa, Artificial Sequence
  Description of Artificial Sequence: Synthetic peptide
  Seed: SIGKVCRTLLAKSVF
SIVKVIRRLLWKSVF

SEQ ID NO: 273120 - protein, 15 aa, Artificial Sequence
  Description of Artificial Sequence: Synthetic peptide
  Seed: SIGKVCRTLLAKSVF
SIVKVIRRLLYKSVF

SEQ ID NO: 273121 - protein, 15 aa, Artificial Sequence
  Description of Artificial Sequence: Synthetic peptide
  Seed: SIGKVCRTLLAKSVF
SIVKVIRSLLAKSVF

SEQ ID NO: 273122 - protein, 15 aa, Artificial Sequence
  Description of Artificial Sequence: Synthetic peptide
  Seed: SIGKVCRTLLAKSVF
SIVKVIRSLLDKSVF

SEQ ID NO: 273123 - protein, 15 aa, Artificial Sequence
  Description of Artificial Sequence: Synthetic peptide
  Seed: SIGKVCRTLLAKSVF
SIVKVIRSLLGKSVF

SEQ ID NO: 273124 - protein, 15 aa, Artificial Sequence
  Description of Artificial Sequence: Synthetic peptide
  Seed: SIGKVCRTLLAKSVF
SIVKVIRSLLHKSVF

SEQ ID NO: 273125 - protein, 15 aa, Artificial Sequence
  Description of Artificial Sequence: Synthetic peptide
  Seed: SIGKVCRTLLAKSVF
SIVKVIRSLLIKSVF

SEQ ID NO: 273126 - protein, 15 aa, Artificial Sequence
  Description of Artificial Sequence: Synthetic peptide
  Seed: SIGKVCRTLLAKSVF
SIVKVIRSLLMKSVF

SEQ ID NO: 273127 - protein, 15 aa, Artificial Sequence
  Description of Artificial Sequence: Synthetic peptide
  Seed: SIGKVCRTLLAKSVF
SIVKVIRSLLNKSVF

SEQ ID NO: 273128 - protein, 15 aa, Artificial Sequence
  Description of Artificial Sequence: Synthetic peptide
  Seed: SIGKVCRTLLAKSVF
SIVKVIRSLLQKSVF

SEQ ID NO: 273129 - protein, 15 aa, Artificial Sequence
  Description of Artificial Sequence: Synthetic peptide
  Seed: SIGKVCRTLLAKSVF
SIVKVIRSLLSKSVF

SEQ ID NO: 273130 - protein, 15 aa, Artificial Sequence
  Description of Artificial Sequence: Synthetic peptide
  Seed: SIGKVCRTLLAKSVF
SIVKVIRSLLTKSVF

SEQ ID NO: 273131 - protein, 15 aa, Artificial Sequence
  Description of Artificial Sequence: Synthetic peptide
  Seed: SIGKVCRTLLAKSVF
SIVKVIRSLLVKSVF

SEQ ID NO: 273132 - protein, 15 aa, Artificial Sequence
  Description of Artificial Sequence: Synthetic peptide
  Seed: SIGKVCRTLLAKSVF
SIVKVIRSLLYKSVF

SEQ ID NO: 273133 - protein, 15 aa, Artificial Sequence
  Description of Artificial Sequence: Synthetic peptide
  Seed: SIGKVCRTLLAKSVF
SIVKVIRTLLAKSVF

SEQ ID NO: 273134 - protein, 15 aa, Artificial Sequence
  Description of Artificial Sequence: Synthetic peptide
  Seed: SIGKVCRTLLAKSVF
SIVKVIRTLLDKSVF

SEQ ID NO: 273135 - protein, 15 aa, Artificial Sequence
  Description of Artificial Sequence: Synthetic peptide
  Seed: SIGKVCRTLLAKSVF
SIVKVIRTLLEKSVF

SEQ ID NO: 273136 - protein, 15 aa, Artificial Sequence
  Description of Artificial Sequence: Synthetic peptide
  Seed: SIGKVCRTLLAKSVF
SIVKVIRTLLGKSVF

SEQ ID NO: 273137 - protein, 15 aa, Artificial Sequence
  Description of Artificial Sequence: Synthetic peptide
  Seed: SIGKVCRTLLAKSVF
SIVKVIRTLLHKSVF

SEQ ID NO: 273138 - protein, 15 aa, Artificial Sequence
  Description of Artificial Sequence: Synthetic peptide
  Seed: SIGKVCRTLLAKSVF
SIVKVIRTLLNKSVF

SEQ ID NO: 273139 - protein, 15 aa, Artificial Sequence
  Description of Artificial Sequence: Synthetic peptide
  Seed: SIGKVCRTLLAKSVF
SIVKVIRTLLPKSVF

SEQ ID NO: 273140 - protein, 15 aa, Artificial Sequence
  Description of Artificial Sequence: Synthetic peptide
  Seed: SIGKVCRTLLAKSVF
SIVKVIRTLLQKSVF

SEQ ID NO: 273141 - protein, 15 aa, Artificial Sequence
  Description of Artificial Sequence: Synthetic peptide
  Seed: SIGKVCRTLLAKSVF
SIVKVIRTLLRKSVF

SEQ ID NO: 273142 - protein, 15 aa, Artificial Sequence
  Description of Artificial Sequence: Synthetic peptide
  Seed: SIGKVCRTLLAKSVF
SIVKVIRTLLSKSVF

SEQ ID NO: 273143 - protein, 15 aa, Artificial Sequence
  Description of Artificial Sequence: Synthetic peptide
  Seed: SIGKVCRTLLAKSVF
SIVKVIRTLLTKSVF

SEQ ID NO: 273144 - protein, 15 aa, Artificial Sequence
  Description of Artificial Sequence: Synthetic peptide
  Seed: SIGKVCRTLLAKSVF
SIVKVIRVLLSKSVF

SEQ ID NO: 273145 - protein, 15 aa, Artificial Sequence
  Description of Artificial Sequence: Synthetic peptide
  Seed: SIGKVCRTLLAKSVF
SIVKVKRALLAKSVF

SEQ ID NO: 273146 - protein, 15 aa, Artificial Sequence
  Description of Artificial Sequence: Synthetic peptide
  Seed: SIGKVCRTLLAKSVF
SIVKVKRALLHKSVF

SEQ ID NO: 273147 - protein, 15 aa, Artificial Sequence
  Description of Artificial Sequence: Synthetic peptide
  Seed: SIGKVCRTLLAKSVF
SIVKVKRALLQKSVF

SEQ ID NO: 273148 - protein, 15 aa, Artificial Sequence
  Description of Artificial Sequence: Synthetic peptide
  Seed: SIGKVCRTLLAKSVF
SIVKVKRALLSKSVF

SEQ ID NO: 273149 - protein, 15 aa, Artificial Sequence
  Description of Artificial Sequence: Synthetic peptide
  Seed: SIGKVCRTLLAKSVF
SIVKVKRHLLGKSVF

SEQ ID NO: 273150 - protein, 15 aa, Artificial Sequence
  Description of Artificial Sequence: Synthetic peptide
  Seed: SIGKVCRTLLAKSVF
SIVKVKRHLLQKSVF

SEQ ID NO: 273151 - protein, 15 aa, Artificial Sequence
  Description of Artificial Sequence: Synthetic peptide
  Seed: SIGKVCRTLLAKSVF
SIVKVKRKLLAKSVF

SEQ ID NO: 273152 - protein, 15 aa, Artificial Sequence
  Description of Artificial Sequence: Synthetic peptide
  Seed: SIGKVCRTLLAKSVF
SIVKVKRKLLCKSVF

SEQ ID NO: 273153 - protein, 15 aa, Artificial Sequence
  Description of Artificial Sequence: Synthetic peptide
  Seed: SIGKVCRTLLAKSVF
SIVKVKRKLLDKSVF

SEQ ID NO: 273154 - protein, 15 aa, Artificial Sequence
  Description of Artificial Sequence: Synthetic peptide
  Seed: SIGKVCRTLLAKSVF
SIVKVKRKLLEKSVF

SEQ ID NO: 273155 - protein, 15 aa, Artificial Sequence
  Description of Artificial Sequence: Synthetic peptide
  Seed: SIGKVCRTLLAKSVF
SIVKVKRKLLGKSVF

SEQ ID NO: 273156 - protein, 15 aa, Artificial Sequence
  Description of Artificial Sequence: Synthetic peptide
  Seed: SIGKVCRTLLAKSVF
SIVKVKRKLLHKSVF

SEQ ID NO: 273157 - protein, 15 aa, Artificial Sequence
  Description of Artificial Sequence: Synthetic peptide
  Seed: SIGKVCRTLLAKSVF
SIVKVKRKLLIKSVF

SEQ ID NO: 273158 - protein, 15 aa, Artificial Sequence
  Description of Artificial Sequence: Synthetic peptide
  Seed: SIGKVCRTLLAKSVF
SIVKVKRKLLLKSVF

SEQ ID NO: 273159 - protein, 15 aa, Artificial Sequence
  Description of Artificial Sequence: Synthetic peptide
  Seed: SIGKVCRTLLAKSVF
SIVKVKRKLLMKSVF

SEQ ID NO: 273160 - protein, 15 aa, Artificial Sequence
  Description of Artificial Sequence: Synthetic peptide
  Seed: SIGKVCRTLLAKSVF
SIVKVKRKLLNKSVF

SEQ ID NO: 273161 - protein, 15 aa, Artificial Sequence
  Description of Artificial Sequence: Synthetic peptide
  Seed: SIGKVCRTLLAKSVF
SIVKVKRKLLQKSVF

SEQ ID NO: 273162 - protein, 15 aa, Artificial Sequence
  Description of Artificial Sequence: Synthetic peptide
  Seed: SIGKVCRTLLAKSVF
SIVKVKRKLLSKSVF

SEQ ID NO: 273163 - protein, 15 aa, Artificial Sequence
  Description of Artificial Sequence: Synthetic peptide
  Seed: SIGKVCRTLLAKSVF
SIVKVKRKLLTKSVF

SEQ ID NO: 273164 - protein, 15 aa, Artificial Sequence
  Description of Artificial Sequence: Synthetic peptide
  Seed: SIGKVCRTLLAKSVF
SIVKVKRKLLVKSVF

SEQ ID NO: 273165 - protein, 15 aa, Artificial Sequence
  Description of Artificial Sequence: Synthetic peptide
  Seed: SIGKVCRTLLAKSVF
SIVKVKRKLLYKSVF

SEQ ID NO: 273166 - protein, 15 aa, Artificial Sequence
  Description of Artificial Sequence: Synthetic peptide
  Seed: SIGKVCRTLLAKSVF
SIVKVKRNLLAKSVF

SEQ ID NO: 273167 - protein, 15 aa, Artificial Sequence
  Description of Artificial Sequence: Synthetic peptide
  Seed: SIGKVCRTLLAKSVF
SIVKVKRNLLGKSVF

SEQ ID NO: 273168 - protein, 15 aa, Artificial Sequence
  Description of Artificial Sequence: Synthetic peptide
  Seed: SIGKVCRTLLAKSVF
SIVKVKRNLLQKSVF

SEQ ID NO: 273169 - protein, 15 aa, Artificial Sequence
  Description of Artificial Sequence: Synthetic peptide
  Seed: SIGKVCRTLLAKSVF
SIVKVKRNLLSKSVF

SEQ ID NO: 273170 - protein, 15 aa, Artificial Sequence
  Description of Artificial Sequence: Synthetic peptide
  Seed: SIGKVCRTLLAKSVF
SIVKVKRQLLGKSVF

SEQ ID NO: 273171 - protein, 15 aa, Artificial Sequence
  Description of Artificial Sequence: Synthetic peptide
  Seed: SIGKVCRTLLAKSVF
SIVKVKRQLLQKSVF

SEQ ID NO: 273172 - protein, 15 aa, Artificial Sequence
  Description of Artificial Sequence: Synthetic peptide
  Seed: SIGKVCRTLLAKSVF
SIVKVKRRLLAKSVF

SEQ ID NO: 273173 - protein, 15 aa, Artificial Sequence
  Description of Artificial Sequence: Synthetic peptide
  Seed: SIGKVCRTLLAKSVF
SIVKVKRRLLCKSVF

SEQ ID NO: 273174 - protein, 15 aa, Artificial Sequence
  Description of Artificial Sequence: Synthetic peptide
  Seed: SIGKVCRTLLAKSVF
SIVKVKRRLLDKSVF

SEQ ID NO: 273175 - protein, 15 aa, Artificial Sequence
  Description of Artificial Sequence: Synthetic peptide
  Seed: SIGKVCRTLLAKSVF
SIVKVKRRLLEKSVF

SEQ ID NO: 273176 - protein, 15 aa, Artificial Sequence
  Description of Artificial Sequence: Synthetic peptide
  Seed: SIGKVCRTLLAKSVF
SIVKVKRRLLGKSVF

SEQ ID NO: 273177 - protein, 15 aa, Artificial Sequence
  Description of Artificial Sequence: Synthetic peptide
  Seed: SIGKVCRTLLAKSVF
SIVKVKRRLLHKSVF

SEQ ID NO: 273178 - protein, 15 aa, Artificial Sequence
  Description of Artificial Sequence: Synthetic peptide
  Seed: SIGKVCRTLLAKSVF
SIVKVKRRLLIKSVF

SEQ ID NO: 273179 - protein, 15 aa, Artificial Sequence
  Description of Artificial Sequence: Synthetic peptide
  Seed: SIGKVCRTLLAKSVF
SIVKVKRRLLLKSVF

SEQ ID NO: 273180 - protein, 15 aa, Artificial Sequence
  Description of Artificial Sequence: Synthetic peptide
  Seed: SIGKVCRTLLAKSVF
SIVKVKRRLLMKSVF

SEQ ID NO: 273181 - protein, 15 aa, Artificial Sequence
  Description of Artificial Sequence: Synthetic peptide
  Seed: SIGKVCRTLLAKSVF
SIVKVKRRLLNKSVF

SEQ ID NO: 273182 - protein, 15 aa, Artificial Sequence
  Description of Artificial Sequence: Synthetic peptide
  Seed: SIGKVCRTLLAKSVF
SIVKVKRRLLQKSVF

SEQ ID NO: 273183 - protein, 15 aa, Artificial Sequence
  Description of Artificial Sequence: Synthetic peptide
  Seed: SIGKVCRTLLAKSVF
SIVKVKRRLLSKSVF

SEQ ID NO: 273184 - protein, 15 aa, Artificial Sequence
  Description of Artificial Sequence: Synthetic peptide
  Seed: SIGKVCRTLLAKSVF
SIVKVKRRLLTKSVF

SEQ ID NO: 273185 - protein, 15 aa, Artificial Sequence
  Description of Artificial Sequence: Synthetic peptide
  Seed: SIGKVCRTLLAKSVF
SIVKVKRRLLVKSVF

SEQ ID NO: 273186 - protein, 15 aa, Artificial Sequence
  Description of Artificial Sequence: Synthetic peptide
  Seed: SIGKVCRTLLAKSVF
SIVKVKRSLLAKSVF

SEQ ID NO: 273187 - protein, 15 aa, Artificial Sequence
  Description of Artificial Sequence: Synthetic peptide
  Seed: SIGKVCRTLLAKSVF
SIVKVKRSLLCKSVF

SEQ ID NO: 273188 - protein, 15 aa, Artificial Sequence
  Description of Artificial Sequence: Synthetic peptide
  Seed: SIGKVCRTLLAKSVF
SIVKVKRSLLGKSVF

SEQ ID NO: 273189 - protein, 15 aa, Artificial Sequence
  Description of Artificial Sequence: Synthetic peptide
  Seed: SIGKVCRTLLAKSVF
SIVKVKRSLLQKSVF

SEQ ID NO: 273190 - protein, 15 aa, Artificial Sequence
  Description of Artificial Sequence: Synthetic peptide
  Seed: SIGKVCRTLLAKSVF
SIVKVKRSLLSKSVF

SEQ ID NO: 273191 - protein, 15 aa, Artificial Sequence
  Description of Artificial Sequence: Synthetic peptide
  Seed: SIGKVCRTLLAKSVF
SIVKVKRTLLAKSVF

SEQ ID NO: 273192 - protein, 15 aa, Artificial Sequence
  Description of Artificial Sequence: Synthetic peptide
  Seed: SIGKVCRTLLAKSVF
SIVKVKRTLLCKSVF

SEQ ID NO: 273193 - protein, 15 aa, Artificial Sequence
  Description of Artificial Sequence: Synthetic peptide
  Seed: SIGKVCRTLLAKSVF
SIVKVKRTLLEKSVF

SEQ ID NO: 273194 - protein, 15 aa, Artificial Sequence
  Description of Artificial Sequence: Synthetic peptide
  Seed: SIGKVCRTLLAKSVF
SIVKVKRTLLGKSVF

SEQ ID NO: 273195 - protein, 15 aa, Artificial Sequence
  Description of Artificial Sequence: Synthetic peptide
  Seed: SIGKVCRTLLAKSVF
SIVKVKRTLLHKSVF

SEQ ID NO: 273196 - protein, 15 aa, Artificial Sequence
  Description of Artificial Sequence: Synthetic peptide
  Seed: SIGKVCRTLLAKSVF
SIVKVKRTLLMKSVF

SEQ ID NO: 273197 - protein, 15 aa, Artificial Sequence
  Description of Artificial Sequence: Synthetic peptide
  Seed: SIGKVCRTLLAKSVF
SIVKVKRTLLQKSVF

SEQ ID NO: 273198 - protein, 15 aa, Artificial Sequence
  Description of Artificial Sequence: Synthetic peptide
  Seed: SIGKVCRTLLAKSVF
SIVKVKRTLLRKSVF

SEQ ID NO: 273199 - protein, 15 aa, Artificial Sequence
  Description of Artificial Sequence: Synthetic peptide
  Seed: SIGKVCRTLLAKSVF
SIVKVKRTLLSKSVF

SEQ ID NO: 273200 - protein, 15 aa, Artificial Sequence
  Description of Artificial Sequence: Synthetic peptide
  Seed: SIGKVCRTLLAKSVF
SIVKVKRTLLVKSVF

SEQ ID NO: 273201 - protein, 15 aa, Artificial Sequence
  Description of Artificial Sequence: Synthetic peptide
  Seed: SIGKVCRTLLAKSVF
SIVKVKRTLLYKSVF

SEQ ID NO: 273202 - protein, 15 aa, Artificial Sequence
  Description of Artificial Sequence: Synthetic peptide
  Seed: SIGKVCRTLLAKSVF
SIVKVKRVLLGKSVF

SEQ ID NO: 273203 - protein, 15 aa, Artificial Sequence
  Description of Artificial Sequence: Synthetic peptide
  Seed: SIGKVCRTLLAKSVF
SIVKVKRVLLQKSVF

SEQ ID NO: 273204 - protein, 15 aa, Artificial Sequence
  Description of Artificial Sequence: Synthetic peptide
  Seed: SIGKVCRTLLAKSVF
SIVKVLRALLAKSVF

SEQ ID NO: 273205 - protein, 15 aa, Artificial Sequence
  Description of Artificial Sequence: Synthetic peptide
  Seed: SIGKVCRTLLAKSVF
SIVKVLRALLGKSVF

SEQ ID NO: 273206 - protein, 15 aa, Artificial Sequence
  Description of Artificial Sequence: Synthetic peptide
  Seed: SIGKVCRTLLAKSVF
SIVKVLRALLHKSVF

SEQ ID NO: 273207 - protein, 15 aa, Artificial Sequence
  Description of Artificial Sequence: Synthetic peptide
  Seed: SIGKVCRTLLAKSVF
SIVKVLRALLNKSVF

SEQ ID NO: 273208 - protein, 15 aa, Artificial Sequence
  Description of Artificial Sequence: Synthetic peptide
  Seed: SIGKVCRTLLAKSVF
SIVKVLRALLQKSVF

SEQ ID NO: 273209 - protein, 15 aa, Artificial Sequence
  Description of Artificial Sequence: Synthetic peptide
  Seed: SIGKVCRTLLAKSVF
SIVKVLRALLSKSVF

SEQ ID NO: 273210 - protein, 15 aa, Artificial Sequence
  Description of Artificial Sequence: Synthetic peptide
  Seed: SIGKVCRTLLAKSVF
SIVKVLRALLTKSVF

SEQ ID NO: 273211 - protein, 15 aa, Artificial Sequence
  Description of Artificial Sequence: Synthetic peptide
  Seed: SIGKVCRTLLAKSVF
SIVKVLRGLLAKSVF

SEQ ID NO: 273212 - protein, 15 aa, Artificial Sequence
  Description of Artificial Sequence: Synthetic peptide
  Seed: SIGKVCRTLLAKSVF
SIVKVLRGLLGKSVF

SEQ ID NO: 273213 - protein, 15 aa, Artificial Sequence
  Description of Artificial Sequence: Synthetic peptide
  Seed: SIGKVCRTLLAKSVF
SIVKVLRGLLHKSVF

SEQ ID NO: 273214 - protein, 15 aa, Artificial Sequence
  Description of Artificial Sequence: Synthetic peptide
  Seed: SIGKVCRTLLAKSVF
SIVKVLRGLLMKSVF

SEQ ID NO: 273215 - protein, 15 aa, Artificial Sequence
  Description of Artificial Sequence: Synthetic peptide
  Seed: SIGKVCRTLLAKSVF
SIVKVLRGLLNKSVF

SEQ ID NO: 273216 - protein, 15 aa, Artificial Sequence
  Description of Artificial Sequence: Synthetic peptide
  Seed: SIGKVCRTLLAKSVF
SIVKVLRGLLQKSVF

SEQ ID NO: 273217 - protein, 15 aa, Artificial Sequence
  Description of Artificial Sequence: Synthetic peptide
  Seed: SIGKVCRTLLAKSVF
SIVKVLRGLLSKSVF

SEQ ID NO: 273218 - protein, 15 aa, Artificial Sequence
  Description of Artificial Sequence: Synthetic peptide
  Seed: SIGKVCRTLLAKSVF
SIVKVLRGLLVKSVF

SEQ ID NO: 273219 - protein, 15 aa, Artificial Sequence
  Description of Artificial Sequence: Synthetic peptide
  Seed: SIGKVCRTLLAKSVF
SIVKVLRGLLYKSVF

SEQ ID NO: 273220 - protein, 15 aa, Artificial Sequence
  Description of Artificial Sequence: Synthetic peptide
  Seed: SIGKVCRTLLAKSVF
SIVKVLRHLLAKSVF

SEQ ID NO: 273221 - protein, 15 aa, Artificial Sequence
  Description of Artificial Sequence: Synthetic peptide
  Seed: SIGKVCRTLLAKSVF
SIVKVLRHLLDKSVF

SEQ ID NO: 273222 - protein, 15 aa, Artificial Sequence
  Description of Artificial Sequence: Synthetic peptide
  Seed: SIGKVCRTLLAKSVF
SIVKVLRHLLEKSVF

SEQ ID NO: 273223 - protein, 15 aa, Artificial Sequence
  Description of Artificial Sequence: Synthetic peptide
  Seed: SIGKVCRTLLAKSVF
SIVKVLRHLLGKSVF

SEQ ID NO: 273224 - protein, 15 aa, Artificial Sequence
  Description of Artificial Sequence: Synthetic peptide
  Seed: SIGKVCRTLLAKSVF
SIVKVLRHLLHKSVF

SEQ ID NO: 273225 - protein, 15 aa, Artificial Sequence
  Description of Artificial Sequence: Synthetic peptide
  Seed: SIGKVCRTLLAKSVF
SIVKVLRHLLIKSVF

SEQ ID NO: 273226 - protein, 15 aa, Artificial Sequence
  Description of Artificial Sequence: Synthetic peptide
  Seed: SIGKVCRTLLAKSVF
SIVKVLRHLLKKSVF

SEQ ID NO: 273227 - protein, 15 aa, Artificial Sequence
  Description of Artificial Sequence: Synthetic peptide
  Seed: SIGKVCRTLLAKSVF
SIVKVLRHLLLKSVF

SEQ ID NO: 273228 - protein, 15 aa, Artificial Sequence
  Description of Artificial Sequence: Synthetic peptide
  Seed: SIGKVCRTLLAKSVF
SIVKVLRHLLMKSVF

SEQ ID NO: 273229 - protein, 15 aa, Artificial Sequence
  Description of Artificial Sequence: Synthetic peptide
  Seed: SIGKVCRTLLAKSVF
SIVKVLRHLLNKSVF

SEQ ID NO: 273230 - protein, 15 aa, Artificial Sequence
  Description of Artificial Sequence: Synthetic peptide
  Seed: SIGKVCRTLLAKSVF
SIVKVLRHLLPKSVF

SEQ ID NO: 273231 - protein, 15 aa, Artificial Sequence
  Description of Artificial Sequence: Synthetic peptide
  Seed: SIGKVCRTLLAKSVF
SIVKVLRHLLQKSVF

SEQ ID NO: 273232 - protein, 15 aa, Artificial Sequence
  Description of Artificial Sequence: Synthetic peptide
  Seed: SIGKVCRTLLAKSVF
SIVKVLRHLLRKSVF

SEQ ID NO: 273233 - protein, 15 aa, Artificial Sequence
  Description of Artificial Sequence: Synthetic peptide
  Seed: SIGKVCRTLLAKSVF
SIVKVLRHLLSKSVF

SEQ ID NO: 273234 - protein, 15 aa, Artificial Sequence
  Description of Artificial Sequence: Synthetic peptide
  Seed: SIGKVCRTLLAKSVF
SIVKVLRHLLTKSVF

SEQ ID NO: 273235 - protein, 15 aa, Artificial Sequence
  Description of Artificial Sequence: Synthetic peptide
  Seed: SIGKVCRTLLAKSVF
SIVKVLRHLLVKSVF

SEQ ID NO: 273236 - protein, 15 aa, Artificial Sequence
  Description of Artificial Sequence: Synthetic peptide
  Seed: SIGKVCRTLLAKSVF
SIVKVLRHLLYKSVF

SEQ ID NO: 273237 - protein, 15 aa, Artificial Sequence
  Description of Artificial Sequence: Synthetic peptide
  Seed: SIGKVCRTLLAKSVF
SIVKVLRILLSKSVF

SEQ ID NO: 273238 - protein, 15 aa, Artificial Sequence
  Description of Artificial Sequence: Synthetic peptide
  Seed: SIGKVCRTLLAKSVF
SIVKVLRKLLAKSVF

SEQ ID NO: 273239 - protein, 15 aa, Artificial Sequence
  Description of Artificial Sequence: Synthetic peptide
  Seed: SIGKVCRTLLAKSVF
SIVKVLRKLLCKSVF

SEQ ID NO: 273240 - protein, 15 aa, Artificial Sequence
  Description of Artificial Sequence: Synthetic peptide
  Seed: SIGKVCRTLLAKSVF
SIVKVLRKLLDKSVF

SEQ ID NO: 273241 - protein, 15 aa, Artificial Sequence
  Description of Artificial Sequence: Synthetic peptide
  Seed: SIGKVCRTLLAKSVF
SIVKVLRKLLEKSVF

SEQ ID NO: 273242 - protein, 15 aa, Artificial Sequence
  Description of Artificial Sequence: Synthetic peptide
  Seed: SIGKVCRTLLAKSVF
SIVKVLRKLLFKSVF

SEQ ID NO: 273243 - protein, 15 aa, Artificial Sequence
  Description of Artificial Sequence: Synthetic peptide
  Seed: SIGKVCRTLLAKSVF
SIVKVLRKLLGKSVF

SEQ ID NO: 273244 - protein, 15 aa, Artificial Sequence
  Description of Artificial Sequence: Synthetic peptide
  Seed: SIGKVCRTLLAKSVF
SIVKVLRKLLHKSVF

SEQ ID NO: 273245 - protein, 15 aa, Artificial Sequence
  Description of Artificial Sequence: Synthetic peptide
  Seed: SIGKVCRTLLAKSVF
SIVKVLRKLLIKSVF

SEQ ID NO: 273246 - protein, 15 aa, Artificial Sequence
  Description of Artificial Sequence: Synthetic peptide
  Seed: SIGKVCRTLLAKSVF
SIVKVLRKLLKKSVF

SEQ ID NO: 273247 - protein, 15 aa, Artificial Sequence
  Description of Artificial Sequence: Synthetic peptide
  Seed: SIGKVCRTLLAKSVF
SIVKVLRKLLLKSVF

SEQ ID NO: 273248 - protein, 15 aa, Artificial Sequence
  Description of Artificial Sequence: Synthetic peptide
  Seed: SIGKVCRTLLAKSVF
SIVKVLRKLLMKSVF

SEQ ID NO: 273249 - protein, 15 aa, Artificial Sequence
  Description of Artificial Sequence: Synthetic peptide
  Seed: SIGKVCRTLLAKSVF
SIVKVLRKLLNKSVF

SEQ ID NO: 273250 - protein, 15 aa, Artificial Sequence
  Description of Artificial Sequence: Synthetic peptide
  Seed: SIGKVCRTLLAKSVF
SIVKVLRKLLPKSVF

SEQ ID NO: 273251 - protein, 15 aa, Artificial Sequence
  Description of Artificial Sequence: Synthetic peptide
  Seed: SIGKVCRTLLAKSVF
SIVKVLRKLLQKSVF

SEQ ID NO: 273252 - protein, 15 aa, Artificial Sequence
  Description of Artificial Sequence: Synthetic peptide
  Seed: SIGKVCRTLLAKSVF
SIVKVLRKLLRKSVF

SEQ ID NO: 273253 - protein, 15 aa, Artificial Sequence
  Description of Artificial Sequence: Synthetic peptide
  Seed: SIGKVCRTLLAKSVF
SIVKVLRKLLSKSVF

SEQ ID NO: 273254 - protein, 15 aa, Artificial Sequence
  Description of Artificial Sequence: Synthetic peptide
  Seed: SIGKVCRTLLAKSVF
SIVKVLRKLLTKSVF

SEQ ID NO: 273255 - protein, 15 aa, Artificial Sequence
  Description of Artificial Sequence: Synthetic peptide
  Seed: SIGKVCRTLLAKSVF
SIVKVLRKLLVKSVF

SEQ ID NO: 273256 - protein, 15 aa, Artificial Sequence
  Description of Artificial Sequence: Synthetic peptide
  Seed: SIGKVCRTLLAKSVF
SIVKVLRKLLWKSVF

SEQ ID NO: 273257 - protein, 15 aa, Artificial Sequence
  Description of Artificial Sequence: Synthetic peptide
  Seed: SIGKVCRTLLAKSVF
SIVKVLRKLLYKSVF

SEQ ID NO: 273258 - protein, 15 aa, Artificial Sequence
  Description of Artificial Sequence: Synthetic peptide
  Seed: SIGKVCRTLLAKSVF
SIVKVLRNLLAKSVF

SEQ ID NO: 273259 - protein, 15 aa, Artificial Sequence
  Description of Artificial Sequence: Synthetic peptide
  Seed: SIGKVCRTLLAKSVF
SIVKVLRNLLDKSVF

SEQ ID NO: 273260 - protein, 15 aa, Artificial Sequence
  Description of Artificial Sequence: Synthetic peptide
  Seed: SIGKVCRTLLAKSVF
SIVKVLRNLLEKSVF

SEQ ID NO: 273261 - protein, 15 aa, Artificial Sequence
  Description of Artificial Sequence: Synthetic peptide
  Seed: SIGKVCRTLLAKSVF
SIVKVLRNLLGKSVF

SEQ ID NO: 273262 - protein, 15 aa, Artificial Sequence
  Description of Artificial Sequence: Synthetic peptide
  Seed: SIGKVCRTLLAKSVF
SIVKVLRNLLHKSVF

SEQ ID NO: 273263 - protein, 15 aa, Artificial Sequence
  Description of Artificial Sequence: Synthetic peptide
  Seed: SIGKVCRTLLAKSVF
SIVKVLRNLLMKSVF

SEQ ID NO: 273264 - protein, 15 aa, Artificial Sequence
  Description of Artificial Sequence: Synthetic peptide
  Seed: SIGKVCRTLLAKSVF
SIVKVLRNLLNKSVF

SEQ ID NO: 273265 - protein, 15 aa, Artificial Sequence
  Description of Artificial Sequence: Synthetic peptide
  Seed: SIGKVCRTLLAKSVF
SIVKVLRNLLPKSVF

SEQ ID NO: 273266 - protein, 15 aa, Artificial Sequence
  Description of Artificial Sequence: Synthetic peptide
  Seed: SIGKVCRTLLAKSVF
SIVKVLRNLLQKSVF

SEQ ID NO: 273267 - protein, 15 aa, Artificial Sequence
  Description of Artificial Sequence: Synthetic peptide
  Seed: SIGKVCRTLLAKSVF
SIVKVLRNLLRKSVF

SEQ ID NO: 273268 - protein, 15 aa, Artificial Sequence
  Description of Artificial Sequence: Synthetic peptide
  Seed: SIGKVCRTLLAKSVF
SIVKVLRNLLSKSVF

SEQ ID NO: 273269 - protein, 15 aa, Artificial Sequence
  Description of Artificial Sequence: Synthetic peptide
  Seed: SIGKVCRTLLAKSVF
SIVKVLRNLLTKSVF

SEQ ID NO: 273270 - protein, 15 aa, Artificial Sequence
  Description of Artificial Sequence: Synthetic peptide
  Seed: SIGKVCRTLLAKSVF
SIVKVLRNLLVKSVF

SEQ ID NO: 273271 - protein, 15 aa, Artificial Sequence
  Description of Artificial Sequence: Synthetic peptide
  Seed: SIGKVCRTLLAKSVF
SIVKVLRNLLYKSVF

SEQ ID NO: 273272 - protein, 15 aa, Artificial Sequence
  Description of Artificial Sequence: Synthetic peptide
  Seed: SIGKVCRTLLAKSVF
SIVKVLRPLLAKSVF

SEQ ID NO: 273273 - protein, 15 aa, Artificial Sequence
  Description of Artificial Sequence: Synthetic peptide
  Seed: SIGKVCRTLLAKSVF
SIVKVLRPLLEKSVF

SEQ ID NO: 273274 - protein, 15 aa, Artificial Sequence
  Description of Artificial Sequence: Synthetic peptide
  Seed: SIGKVCRTLLAKSVF
SIVKVLRPLLGKSVF

SEQ ID NO: 273275 - protein, 15 aa, Artificial Sequence
  Description of Artificial Sequence: Synthetic peptide
  Seed: SIGKVCRTLLAKSVF
SIVKVLRPLLHKSVF

SEQ ID NO: 273276 - protein, 15 aa, Artificial Sequence
  Description of Artificial Sequence: Synthetic peptide
  Seed: SIGKVCRTLLAKSVF
SIVKVLRPLLIKSVF

SEQ ID NO: 273277 - protein, 15 aa, Artificial Sequence
  Description of Artificial Sequence: Synthetic peptide
  Seed: SIGKVCRTLLAKSVF
SIVKVLRPLLLKSVF

SEQ ID NO: 273278 - protein, 15 aa, Artificial Sequence
  Description of Artificial Sequence: Synthetic peptide
  Seed: SIGKVCRTLLAKSVF
SIVKVLRPLLMKSVF

SEQ ID NO: 273279 - protein, 15 aa, Artificial Sequence
  Description of Artificial Sequence: Synthetic peptide
  Seed: SIGKVCRTLLAKSVF
SIVKVLRPLLNKSVF

SEQ ID NO: 273280 - protein, 15 aa, Artificial Sequence
  Description of Artificial Sequence: Synthetic peptide
  Seed: SIGKVCRTLLAKSVF
SIVKVLRPLLQKSVF

SEQ ID NO: 273281 - protein, 15 aa, Artificial Sequence
  Description of Artificial Sequence: Synthetic peptide
  Seed: SIGKVCRTLLAKSVF
SIVKVLRPLLSKSVF

SEQ ID NO: 273282 - protein, 15 aa, Artificial Sequence
  Description of Artificial Sequence: Synthetic peptide
  Seed: SIGKVCRTLLAKSVF
SIVKVLRPLLTKSVF

SEQ ID NO: 273283 - protein, 15 aa, Artificial Sequence
  Description of Artificial Sequence: Synthetic peptide
  Seed: SIGKVCRTLLAKSVF
SIVKVLRPLLVKSVF

SEQ ID NO: 273284 - protein, 15 aa, Artificial Sequence
  Description of Artificial Sequence: Synthetic peptide
  Seed: SIGKVCRTLLAKSVF
SIVKVLRPLLYKSVF

SEQ ID NO: 273285 - protein, 15 aa, Artificial Sequence
  Description of Artificial Sequence: Synthetic peptide
  Seed: SIGKVCRTLLAKSVF
SIVKVLRQLLAKSVF

SEQ ID NO: 273286 - protein, 15 aa, Artificial Sequence
  Description of Artificial Sequence: Synthetic peptide
  Seed: SIGKVCRTLLAKSVF
SIVKVLRQLLGKSVF

SEQ ID NO: 273287 - protein, 15 aa, Artificial Sequence
  Description of Artificial Sequence: Synthetic peptide
  Seed: SIGKVCRTLLAKSVF
SIVKVLRQLLHKSVF

SEQ ID NO: 273288 - protein, 15 aa, Artificial Sequence
  Description of Artificial Sequence: Synthetic peptide
  Seed: SIGKVCRTLLAKSVF
SIVKVLRQLLNKSVF

SEQ ID NO: 273289 - protein, 15 aa, Artificial Sequence
  Description of Artificial Sequence: Synthetic peptide
  Seed: SIGKVCRTLLAKSVF
SIVKVLRQLLQKSVF

SEQ ID NO: 273290 - protein, 15 aa, Artificial Sequence
  Description of Artificial Sequence: Synthetic peptide
  Seed: SIGKVCRTLLAKSVF
SIVKVLRQLLSKSVF

SEQ ID NO: 273291 - protein, 15 aa, Artificial Sequence
  Description of Artificial Sequence: Synthetic peptide
  Seed: SIGKVCRTLLAKSVF
SIVKVLRQLLTKSVF

SEQ ID NO: 273292 - protein, 15 aa, Artificial Sequence
  Description of Artificial Sequence: Synthetic peptide
  Seed: SIGKVCRTLLAKSVF
SIVKVLRRLLAKSVF

SEQ ID NO: 273293 - protein, 15 aa, Artificial Sequence
  Description of Artificial Sequence: Synthetic peptide
  Seed: SIGKVCRTLLAKSVF
SIVKVLRRLLCKSVF

SEQ ID NO: 273294 - protein, 15 aa, Artificial Sequence
  Description of Artificial Sequence: Synthetic peptide
  Seed: SIGKVCRTLLAKSVF
SIVKVLRRLLDKSVF

SEQ ID NO: 273295 - protein, 15 aa, Artificial Sequence
  Description of Artificial Sequence: Synthetic peptide
  Seed: SIGKVCRTLLAKSVF
SIVKVLRRLLEKSVF

SEQ ID NO: 273296 - protein, 15 aa, Artificial Sequence
  Description of Artificial Sequence: Synthetic peptide
  Seed: SIGKVCRTLLAKSVF
SIVKVLRRLLFKSVF

SEQ ID NO: 273297 - protein, 15 aa, Artificial Sequence
  Description of Artificial Sequence: Synthetic peptide
  Seed: SIGKVCRTLLAKSVF
SIVKVLRRLLGKSVF

SEQ ID NO: 273298 - protein, 15 aa, Artificial Sequence
  Description of Artificial Sequence: Synthetic peptide
  Seed: SIGKVCRTLLAKSVF
SIVKVLRRLLHKSVF

SEQ ID NO: 273299 - protein, 15 aa, Artificial Sequence
  Description of Artificial Sequence: Synthetic peptide
  Seed: SIGKVCRTLLAKSVF
SIVKVLRRLLIKSVF

SEQ ID NO: 273300 - protein, 15 aa, Artificial Sequence
  Description of Artificial Sequence: Synthetic peptide
  Seed: SIGKVCRTLLAKSVF
SIVKVLRRLLKKSVF

SEQ ID NO: 273301 - protein, 15 aa, Artificial Sequence
  Description of Artificial Sequence: Synthetic peptide
  Seed: SIGKVCRTLLAKSVF
SIVKVLRRLLLKSVF

SEQ ID NO: 273302 - protein, 15 aa, Artificial Sequence
  Description of Artificial Sequence: Synthetic peptide
  Seed: SIGKVCRTLLAKSVF
SIVKVLRRLLMKSVF

SEQ ID NO: 273303 - protein, 15 aa, Artificial Sequence
  Description of Artificial Sequence: Synthetic peptide
  Seed: SIGKVCRTLLAKSVF
SIVKVLRRLLNKSVF

SEQ ID NO: 273304 - protein, 15 aa, Artificial Sequence
  Description of Artificial Sequence: Synthetic peptide
  Seed: SIGKVCRTLLAKSVF
SIVKVLRRLLPKSVF

SEQ ID NO: 273305 - protein, 15 aa, Artificial Sequence
  Description of Artificial Sequence: Synthetic peptide
  Seed: SIGKVCRTLLAKSVF
SIVKVLRRLLQKSVF

SEQ ID NO: 273306 - protein, 15 aa, Artificial Sequence
  Description of Artificial Sequence: Synthetic peptide
  Seed: SIGKVCRTLLAKSVF
SIVKVLRRLLRKSVF

SEQ ID NO: 273307 - protein, 15 aa, Artificial Sequence
  Description of Artificial Sequence: Synthetic peptide
  Seed: SIGKVCRTLLAKSVF
SIVKVLRRLLSKSVF

SEQ ID NO: 273308 - protein, 15 aa, Artificial Sequence
  Description of Artificial Sequence: Synthetic peptide
  Seed: SIGKVCRTLLAKSVF
SIVKVLRRLLTKSVF

SEQ ID NO: 273309 - protein, 15 aa, Artificial Sequence
  Description of Artificial Sequence: Synthetic peptide
  Seed: SIGKVCRTLLAKSVF
SIVKVLRRLLVKSVF

SEQ ID NO: 273310 - protein, 15 aa, Artificial Sequence
  Description of Artificial Sequence: Synthetic peptide
  Seed: SIGKVCRTLLAKSVF
SIVKVLRRLLWKSVF

SEQ ID NO: 273311 - protein, 15 aa, Artificial Sequence
  Description of Artificial Sequence: Synthetic peptide
  Seed: SIGKVCRTLLAKSVF
SIVKVLRRLLYKSVF

SEQ ID NO: 273312 - protein, 15 aa, Artificial Sequence
  Description of Artificial Sequence: Synthetic peptide
  Seed: SIGKVCRTLLAKSVF
SIVKVLRSLLAKSVF

SEQ ID NO: 273313 - protein, 15 aa, Artificial Sequence
  Description of Artificial Sequence: Synthetic peptide
  Seed: SIGKVCRTLLAKSVF
SIVKVLRSLLDKSVF

SEQ ID NO: 273314 - protein, 15 aa, Artificial Sequence
  Description of Artificial Sequence: Synthetic peptide
  Seed: SIGKVCRTLLAKSVF
SIVKVLRSLLEKSVF

SEQ ID NO: 273315 - protein, 15 aa, Artificial Sequence
  Description of Artificial Sequence: Synthetic peptide
  Seed: SIGKVCRTLLAKSVF
SIVKVLRSLLGKSVF

SEQ ID NO: 273316 - protein, 15 aa, Artificial Sequence
  Description of Artificial Sequence: Synthetic peptide
  Seed: SIGKVCRTLLAKSVF
SIVKVLRSLLHKSVF

SEQ ID NO: 273317 - protein, 15 aa, Artificial Sequence
  Description of Artificial Sequence: Synthetic peptide
  Seed: SIGKVCRTLLAKSVF
SIVKVLRSLLMKSVF

SEQ ID NO: 273318 - protein, 15 aa, Artificial Sequence
  Description of Artificial Sequence: Synthetic peptide
  Seed: SIGKVCRTLLAKSVF
SIVKVLRSLLNKSVF

SEQ ID NO: 273319 - protein, 15 aa, Artificial Sequence
  Description of Artificial Sequence: Synthetic peptide
  Seed: SIGKVCRTLLAKSVF
SIVKVLRSLLPKSVF

SEQ ID NO: 273320 - protein, 15 aa, Artificial Sequence
  Description of Artificial Sequence: Synthetic peptide
  Seed: SIGKVCRTLLAKSVF
SIVKVLRSLLQKSVF

SEQ ID NO: 273321 - protein, 15 aa, Artificial Sequence
  Description of Artificial Sequence: Synthetic peptide
  Seed: SIGKVCRTLLAKSVF
SIVKVLRSLLRKSVF

SEQ ID NO: 273322 - protein, 15 aa, Artificial Sequence
  Description of Artificial Sequence: Synthetic peptide
  Seed: SIGKVCRTLLAKSVF
SIVKVLRSLLSKSVF

SEQ ID NO: 273323 - protein, 15 aa, Artificial Sequence
  Description of Artificial Sequence: Synthetic peptide
  Seed: SIGKVCRTLLAKSVF
SIVKVLRSLLTKSVF

SEQ ID NO: 273324 - protein, 15 aa, Artificial Sequence
  Description of Artificial Sequence: Synthetic peptide
  Seed: SIGKVCRTLLAKSVF
SIVKVLRSLLVKSVF

SEQ ID NO: 273325 - protein, 15 aa, Artificial Sequence
  Description of Artificial Sequence: Synthetic peptide
  Seed: SIGKVCRTLLAKSVF
SIVKVLRSLLYKSVF

SEQ ID NO: 273326 - protein, 15 aa, Artificial Sequence
  Description of Artificial Sequence: Synthetic peptide
  Seed: SIGKVCRTLLAKSVF
SIVKVLRTLLAKSVF

SEQ ID NO: 273327 - protein, 15 aa, Artificial Sequence
  Description of Artificial Sequence: Synthetic peptide
  Seed: SIGKVCRTLLAKSVF
SIVKVLRTLLDKSVF

SEQ ID NO: 273328 - protein, 15 aa, Artificial Sequence
  Description of Artificial Sequence: Synthetic peptide
  Seed: SIGKVCRTLLAKSVF
SIVKVLRTLLEKSVF

SEQ ID NO: 273329 - protein, 15 aa, Artificial Sequence
  Description of Artificial Sequence: Synthetic peptide
  Seed: SIGKVCRTLLAKSVF
SIVKVLRTLLGKSVF

SEQ ID NO: 273330 - protein, 15 aa, Artificial Sequence
  Description of Artificial Sequence: Synthetic peptide
  Seed: SIGKVCRTLLAKSVF
SIVKVLRTLLHKSVF

SEQ ID NO: 273331 - protein, 15 aa, Artificial Sequence
  Description of Artificial Sequence: Synthetic peptide
  Seed: SIGKVCRTLLAKSVF
SIVKVLRTLLNKSVF

SEQ ID NO: 273332 - protein, 15 aa, Artificial Sequence
  Description of Artificial Sequence: Synthetic peptide
  Seed: SIGKVCRTLLAKSVF
SIVKVLRTLLPKSVF

SEQ ID NO: 273333 - protein, 15 aa, Artificial Sequence
  Description of Artificial Sequence: Synthetic peptide
  Seed: SIGKVCRTLLAKSVF
SIVKVLRTLLQKSVF

SEQ ID NO: 273334 - protein, 15 aa, Artificial Sequence
  Description of Artificial Sequence: Synthetic peptide
  Seed: SIGKVCRTLLAKSVF
SIVKVLRTLLRKSVF

SEQ ID NO: 273335 - protein, 15 aa, Artificial Sequence
  Description of Artificial Sequence: Synthetic peptide
  Seed: SIGKVCRTLLAKSVF
SIVKVLRTLLSKSVF

SEQ ID NO: 273336 - protein, 15 aa, Artificial Sequence
  Description of Artificial Sequence: Synthetic peptide
  Seed: SIGKVCRTLLAKSVF
SIVKVLRTLLTKSVF

SEQ ID NO: 273337 - protein, 15 aa, Artificial Sequence
  Description of Artificial Sequence: Synthetic peptide
  Seed: SIGKVCRTLLAKSVF
SIVKVLRTLLYKSVF

SEQ ID NO: 273338 - protein, 15 aa, Artificial Sequence
  Description of Artificial Sequence: Synthetic peptide
  Seed: SIGKVCRTLLAKSVF
SIVKVLRVLLHKSVF

SEQ ID NO: 273339 - protein, 15 aa, Artificial Sequence
  Description of Artificial Sequence: Synthetic peptide
  Seed: SIGKVCRTLLAKSVF
SIVKVLRVLLSKSVF

SEQ ID NO: 273340 - protein, 15 aa, Artificial Sequence
  Description of Artificial Sequence: Synthetic peptide
  Seed: SIGKVCRTLLAKSVF
SIVKVMRALLAKSVF

SEQ ID NO: 273341 - protein, 15 aa, Artificial Sequence
  Description of Artificial Sequence: Synthetic peptide
  Seed: SIGKVCRTLLAKSVF
SIVKVMRALLEKSVF

SEQ ID NO: 273342 - protein, 15 aa, Artificial Sequence
  Description of Artificial Sequence: Synthetic peptide
  Seed: SIGKVCRTLLAKSVF
SIVKVMRALLGKSVF

SEQ ID NO: 273343 - protein, 15 aa, Artificial Sequence
  Description of Artificial Sequence: Synthetic peptide
  Seed: SIGKVCRTLLAKSVF
SIVKVMRALLHKSVF

SEQ ID NO: 273344 - protein, 15 aa, Artificial Sequence
  Description of Artificial Sequence: Synthetic peptide
  Seed: SIGKVCRTLLAKSVF
SIVKVMRALLMKSVF

SEQ ID NO: 273345 - protein, 15 aa, Artificial Sequence
  Description of Artificial Sequence: Synthetic peptide
  Seed: SIGKVCRTLLAKSVF
SIVKVMRALLNKSVF

SEQ ID NO: 273346 - protein, 15 aa, Artificial Sequence
  Description of Artificial Sequence: Synthetic peptide
  Seed: SIGKVCRTLLAKSVF
SIVKVMRALLPKSVF

SEQ ID NO: 273347 - protein, 15 aa, Artificial Sequence
  Description of Artificial Sequence: Synthetic peptide
  Seed: SIGKVCRTLLAKSVF
SIVKVMRALLQKSVF

SEQ ID NO: 273348 - protein, 15 aa, Artificial Sequence
  Description of Artificial Sequence: Synthetic peptide
  Seed: SIGKVCRTLLAKSVF
SIVKVMRALLRKSVF

SEQ ID NO: 273349 - protein, 15 aa, Artificial Sequence
  Description of Artificial Sequence: Synthetic peptide
  Seed: SIGKVCRTLLAKSVF
SIVKVMRALLSKSVF

SEQ ID NO: 273350 - protein, 15 aa, Artificial Sequence
  Description of Artificial Sequence: Synthetic peptide
  Seed: SIGKVCRTLLAKSVF
SIVKVMRALLTKSVF

SEQ ID NO: 273351 - protein, 15 aa, Artificial Sequence
  Description of Artificial Sequence: Synthetic peptide
  Seed: SIGKVCRTLLAKSVF
SIVKVMRALLVKSVF

SEQ ID NO: 273352 - protein, 15 aa, Artificial Sequence
  Description of Artificial Sequence: Synthetic peptide
  Seed: SIGKVCRTLLAKSVF
SIVKVMRALLYKSVF

SEQ ID NO: 273353 - protein, 15 aa, Artificial Sequence
  Description of Artificial Sequence: Synthetic peptide
  Seed: SIGKVCRTLLAKSVF
SIVKVMRDLLAKSVF

SEQ ID NO: 273354 - protein, 15 aa, Artificial Sequence
  Description of Artificial Sequence: Synthetic peptide
  Seed: SIGKVCRTLLAKSVF
SIVKVMRDLLRKSVF

SEQ ID NO: 273355 - protein, 15 aa, Artificial Sequence
  Description of Artificial Sequence: Synthetic peptide
  Seed: SIGKVCRTLLAKSVF
SIVKVMRDLLSKSVF

SEQ ID NO: 273356 - protein, 15 aa, Artificial Sequence
  Description of Artificial Sequence: Synthetic peptide
  Seed: SIGKVCRTLLAKSVF
SIVKVMRELLAKSVF

SEQ ID NO: 273357 - protein, 15 aa, Artificial Sequence
  Description of Artificial Sequence: Synthetic peptide
  Seed: SIGKVCRTLLAKSVF
SIVKVMRELLKKSVF

SEQ ID NO: 273358 - protein, 15 aa, Artificial Sequence
  Description of Artificial Sequence: Synthetic peptide
  Seed: SIGKVCRTLLAKSVF
SIVKVMRELLRKSVF

SEQ ID NO: 273359 - protein, 15 aa, Artificial Sequence
  Description of Artificial Sequence: Synthetic peptide
  Seed: SIGKVCRTLLAKSVF
SIVKVMRELLSKSVF

SEQ ID NO: 273360 - protein, 15 aa, Artificial Sequence
  Description of Artificial Sequence: Synthetic peptide
  Seed: SIGKVCRTLLAKSVF
SIVKVMRGLLAKSVF

SEQ ID NO: 273361 - protein, 15 aa, Artificial Sequence
  Description of Artificial Sequence: Synthetic peptide
  Seed: SIGKVCRTLLAKSVF
SIVKVMRGLLEKSVF

SEQ ID NO: 273362 - protein, 15 aa, Artificial Sequence
  Description of Artificial Sequence: Synthetic peptide
  Seed: SIGKVCRTLLAKSVF
SIVKVMRGLLGKSVF

SEQ ID NO: 273363 - protein, 15 aa, Artificial Sequence
  Description of Artificial Sequence: Synthetic peptide
  Seed: SIGKVCRTLLAKSVF
SIVKVMRGLLHKSVF

SEQ ID NO: 273364 - protein, 15 aa, Artificial Sequence
  Description of Artificial Sequence: Synthetic peptide
  Seed: SIGKVCRTLLAKSVF
SIVKVMRGLLIKSVF

SEQ ID NO: 273365 - protein, 15 aa, Artificial Sequence
  Description of Artificial Sequence: Synthetic peptide
  Seed: SIGKVCRTLLAKSVF
SIVKVMRGLLLKSVF

SEQ ID NO: 273366 - protein, 15 aa, Artificial Sequence
  Description of Artificial Sequence: Synthetic peptide
  Seed: SIGKVCRTLLAKSVF
SIVKVMRGLLMKSVF

SEQ ID NO: 273367 - protein, 15 aa, Artificial Sequence
  Description of Artificial Sequence: Synthetic peptide
  Seed: SIGKVCRTLLAKSVF
SIVKVMRGLLNKSVF

SEQ ID NO: 273368 - protein, 15 aa, Artificial Sequence
  Description of Artificial Sequence: Synthetic peptide
  Seed: SIGKVCRTLLAKSVF
SIVKVMRGLLQKSVF

SEQ ID NO: 273369 - protein, 15 aa, Artificial Sequence
  Description of Artificial Sequence: Synthetic peptide
  Seed: SIGKVCRTLLAKSVF
SIVKVMRGLLSKSVF

SEQ ID NO: 273370 - protein, 15 aa, Artificial Sequence
  Description of Artificial Sequence: Synthetic peptide
  Seed: SIGKVCRTLLAKSVF
SIVKVMRGLLTKSVF

SEQ ID NO: 273371 - protein, 15 aa, Artificial Sequence
  Description of Artificial Sequence: Synthetic peptide
  Seed: SIGKVCRTLLAKSVF
SIVKVMRGLLVKSVF

SEQ ID NO: 273372 - protein, 15 aa, Artificial Sequence
  Description of Artificial Sequence: Synthetic peptide
  Seed: SIGKVCRTLLAKSVF
SIVKVMRGLLYKSVF

SEQ ID NO: 273373 - protein, 15 aa, Artificial Sequence
  Description of Artificial Sequence: Synthetic peptide
  Seed: SIGKVCRTLLAKSVF
SIVKVMRHLLAKSVF

SEQ ID NO: 273374 - protein, 15 aa, Artificial Sequence
  Description of Artificial Sequence: Synthetic peptide
  Seed: SIGKVCRTLLAKSVF
SIVKVMRHLLCKSVF

SEQ ID NO: 273375 - protein, 15 aa, Artificial Sequence
  Description of Artificial Sequence: Synthetic peptide
  Seed: SIGKVCRTLLAKSVF
SIVKVMRHLLDKSVF

SEQ ID NO: 273376 - protein, 15 aa, Artificial Sequence
  Description of Artificial Sequence: Synthetic peptide
  Seed: SIGKVCRTLLAKSVF
SIVKVMRHLLEKSVF

SEQ ID NO: 273377 - protein, 15 aa, Artificial Sequence
  Description of Artificial Sequence: Synthetic peptide
  Seed: SIGKVCRTLLAKSVF
SIVKVMRHLLFKSVF

SEQ ID NO: 273378 - protein, 15 aa, Artificial Sequence
  Description of Artificial Sequence: Synthetic peptide
  Seed: SIGKVCRTLLAKSVF
SIVKVMRHLLGKSVF

SEQ ID NO: 273379 - protein, 15 aa, Artificial Sequence
  Description of Artificial Sequence: Synthetic peptide
  Seed: SIGKVCRTLLAKSVF
SIVKVMRHLLHKSVF

SEQ ID NO: 273380 - protein, 15 aa, Artificial Sequence
  Description of Artificial Sequence: Synthetic peptide
  Seed: SIGKVCRTLLAKSVF
SIVKVMRHLLIKSVF

SEQ ID NO: 273381 - protein, 15 aa, Artificial Sequence
  Description of Artificial Sequence: Synthetic peptide
  Seed: SIGKVCRTLLAKSVF
SIVKVMRHLLKKSVF

SEQ ID NO: 273382 - protein, 15 aa, Artificial Sequence
  Description of Artificial Sequence: Synthetic peptide
  Seed: SIGKVCRTLLAKSVF
SIVKVMRHLLLKSVF

SEQ ID NO: 273383 - protein, 15 aa, Artificial Sequence
  Description of Artificial Sequence: Synthetic peptide
  Seed: SIGKVCRTLLAKSVF
SIVKVMRHLLMKSVF

SEQ ID NO: 273384 - protein, 15 aa, Artificial Sequence
  Description of Artificial Sequence: Synthetic peptide
  Seed: SIGKVCRTLLAKSVF
SIVKVMRHLLNKSVF

SEQ ID NO: 273385 - protein, 15 aa, Artificial Sequence
  Description of Artificial Sequence: Synthetic peptide
  Seed: SIGKVCRTLLAKSVF
SIVKVMRHLLPKSVF

SEQ ID NO: 273386 - protein, 15 aa, Artificial Sequence
  Description of Artificial Sequence: Synthetic peptide
  Seed: SIGKVCRTLLAKSVF
SIVKVMRHLLQKSVF

SEQ ID NO: 273387 - protein, 15 aa, Artificial Sequence
  Description of Artificial Sequence: Synthetic peptide
  Seed: SIGKVCRTLLAKSVF
SIVKVMRHLLRKSVF

SEQ ID NO: 273388 - protein, 15 aa, Artificial Sequence
  Description of Artificial Sequence: Synthetic peptide
  Seed: SIGKVCRTLLAKSVF
SIVKVMRHLLSKSVF

SEQ ID NO: 273389 - protein, 15 aa, Artificial Sequence
  Description of Artificial Sequence: Synthetic peptide
  Seed: SIGKVCRTLLAKSVF
SIVKVMRHLLTKSVF

SEQ ID NO: 273390 - protein, 15 aa, Artificial Sequence
  Description of Artificial Sequence: Synthetic peptide
  Seed: SIGKVCRTLLAKSVF
SIVKVMRHLLVKSVF

SEQ ID NO: 273391 - protein, 15 aa, Artificial Sequence
  Description of Artificial Sequence: Synthetic peptide
  Seed: SIGKVCRTLLAKSVF
SIVKVMRHLLYKSVF

SEQ ID NO: 273392 - protein, 15 aa, Artificial Sequence
  Description of Artificial Sequence: Synthetic peptide
  Seed: SIGKVCRTLLAKSVF
SIVKVMRILLHKSVF

SEQ ID NO: 273393 - protein, 15 aa, Artificial Sequence
  Description of Artificial Sequence: Synthetic peptide
  Seed: SIGKVCRTLLAKSVF
SIVKVMRILLNKSVF

SEQ ID NO: 273394 - protein, 15 aa, Artificial Sequence
  Description of Artificial Sequence: Synthetic peptide
  Seed: SIGKVCRTLLAKSVF
SIVKVMRILLQKSVF

SEQ ID NO: 273395 - protein, 15 aa, Artificial Sequence
  Description of Artificial Sequence: Synthetic peptide
  Seed: SIGKVCRTLLAKSVF
SIVKVMRILLSKSVF

SEQ ID NO: 273396 - protein, 15 aa, Artificial Sequence
  Description of Artificial Sequence: Synthetic peptide
  Seed: SIGKVCRTLLAKSVF
SIVKVMRILLTKSVF

SEQ ID NO: 273397 - protein, 15 aa, Artificial Sequence
  Description of Artificial Sequence: Synthetic peptide
  Seed: SIGKVCRTLLAKSVF
SIVKVMRKLLAKSVF

SEQ ID NO: 273398 - protein, 15 aa, Artificial Sequence
  Description of Artificial Sequence: Synthetic peptide
  Seed: SIGKVCRTLLAKSVF
SIVKVMRKLLCKSVF

SEQ ID NO: 273399 - protein, 15 aa, Artificial Sequence
  Description of Artificial Sequence: Synthetic peptide
  Seed: SIGKVCRTLLAKSVF
SIVKVMRKLLDKSVF

SEQ ID NO: 273400 - protein, 15 aa, Artificial Sequence
  Description of Artificial Sequence: Synthetic peptide
  Seed: SIGKVCRTLLAKSVF
SIVKVMRKLLEKSVF

SEQ ID NO: 273401 - protein, 15 aa, Artificial Sequence
  Description of Artificial Sequence: Synthetic peptide
  Seed: SIGKVCRTLLAKSVF
SIVKVMRKLLFKSVF

SEQ ID NO: 273402 - protein, 15 aa, Artificial Sequence
  Description of Artificial Sequence: Synthetic peptide
  Seed: SIGKVCRTLLAKSVF
SIVKVMRKLLGKSVF

SEQ ID NO: 273403 - protein, 15 aa, Artificial Sequence
  Description of Artificial Sequence: Synthetic peptide
  Seed: SIGKVCRTLLAKSVF
SIVKVMRKLLHKSVF

SEQ ID NO: 273404 - protein, 15 aa, Artificial Sequence
  Description of Artificial Sequence: Synthetic peptide
  Seed: SIGKVCRTLLAKSVF
SIVKVMRKLLIKSVF

SEQ ID NO: 273405 - protein, 15 aa, Artificial Sequence
  Description of Artificial Sequence: Synthetic peptide
  Seed: SIGKVCRTLLAKSVF
SIVKVMRKLLKKSVF

SEQ ID NO: 273406 - protein, 15 aa, Artificial Sequence
  Description of Artificial Sequence: Synthetic peptide
  Seed: SIGKVCRTLLAKSVF
SIVKVMRKLLLKSVF

SEQ ID NO: 273407 - protein, 15 aa, Artificial Sequence
  Description of Artificial Sequence: Synthetic peptide
  Seed: SIGKVCRTLLAKSVF
SIVKVMRKLLMKSVF

SEQ ID NO: 273408 - protein, 15 aa, Artificial Sequence
  Description of Artificial Sequence: Synthetic peptide
  Seed: SIGKVCRTLLAKSVF
SIVKVMRKLLNKSVF

SEQ ID NO: 273409 - protein, 15 aa, Artificial Sequence
  Description of Artificial Sequence: Synthetic peptide
  Seed: SIGKVCRTLLAKSVF
SIVKVMRKLLPKSVF

SEQ ID NO: 273410 - protein, 15 aa, Artificial Sequence
  Description of Artificial Sequence: Synthetic peptide
  Seed: SIGKVCRTLLAKSVF
SIVKVMRKLLQKSVF

SEQ ID NO: 273411 - protein, 15 aa, Artificial Sequence
  Description of Artificial Sequence: Synthetic peptide
  Seed: SIGKVCRTLLAKSVF
SIVKVMRKLLRKSVF

SEQ ID NO: 273412 - protein, 15 aa, Artificial Sequence
  Description of Artificial Sequence: Synthetic peptide
  Seed: SIGKVCRTLLAKSVF
SIVKVMRKLLSKSVF

SEQ ID NO: 273413 - protein, 15 aa, Artificial Sequence
  Description of Artificial Sequence: Synthetic peptide
  Seed: SIGKVCRTLLAKSVF
SIVKVMRKLLTKSVF

SEQ ID NO: 273414 - protein, 15 aa, Artificial Sequence
  Description of Artificial Sequence: Synthetic peptide
  Seed: SIGKVCRTLLAKSVF
SIVKVMRKLLVKSVF

SEQ ID NO: 273415 - protein, 15 aa, Artificial Sequence
  Description of Artificial Sequence: Synthetic peptide
  Seed: SIGKVCRTLLAKSVF
SIVKVMRKLLWKSVF

SEQ ID NO: 273416 - protein, 15 aa, Artificial Sequence
  Description of Artificial Sequence: Synthetic peptide
  Seed: SIGKVCRTLLAKSVF
SIVKVMRKLLYKSVF

SEQ ID NO: 273417 - protein, 15 aa, Artificial Sequence
  Description of Artificial Sequence: Synthetic peptide
  Seed: SIGKVCRTLLAKSVF
SIVKVMRLLLHKSVF

SEQ ID NO: 273418 - protein, 15 aa, Artificial Sequence
  Description of Artificial Sequence: Synthetic peptide
  Seed: SIGKVCRTLLAKSVF
SIVKVMRLLLSKSVF

SEQ ID NO: 273419 - protein, 15 aa, Artificial Sequence
  Description of Artificial Sequence: Synthetic peptide
  Seed: SIGKVCRTLLAKSVF
SIVKVMRMLLSKSVF

SEQ ID NO: 273420 - protein, 15 aa, Artificial Sequence
  Description of Artificial Sequence: Synthetic peptide
  Seed: SIGKVCRTLLAKSVF
SIVKVMRNLLAKSVF

SEQ ID NO: 273421 - protein, 15 aa, Artificial Sequence
  Description of Artificial Sequence: Synthetic peptide
  Seed: SIGKVCRTLLAKSVF
SIVKVMRNLLDKSVF

SEQ ID NO: 273422 - protein, 15 aa, Artificial Sequence
  Description of Artificial Sequence: Synthetic peptide
  Seed: SIGKVCRTLLAKSVF
SIVKVMRNLLEKSVF

SEQ ID NO: 273423 - protein, 15 aa, Artificial Sequence
  Description of Artificial Sequence: Synthetic peptide
  Seed: SIGKVCRTLLAKSVF
SIVKVMRNLLGKSVF

SEQ ID NO: 273424 - protein, 15 aa, Artificial Sequence
  Description of Artificial Sequence: Synthetic peptide
  Seed: SIGKVCRTLLAKSVF
SIVKVMRNLLHKSVF

SEQ ID NO: 273425 - protein, 15 aa, Artificial Sequence
  Description of Artificial Sequence: Synthetic peptide
  Seed: SIGKVCRTLLAKSVF
SIVKVMRNLLIKSVF

SEQ ID NO: 273426 - protein, 15 aa, Artificial Sequence
  Description of Artificial Sequence: Synthetic peptide
  Seed: SIGKVCRTLLAKSVF
SIVKVMRNLLKKSVF

SEQ ID NO: 273427 - protein, 15 aa, Artificial Sequence
  Description of Artificial Sequence: Synthetic peptide
  Seed: SIGKVCRTLLAKSVF
SIVKVMRNLLLKSVF

SEQ ID NO: 273428 - protein, 15 aa, Artificial Sequence
  Description of Artificial Sequence: Synthetic peptide
  Seed: SIGKVCRTLLAKSVF
SIVKVMRNLLMKSVF

SEQ ID NO: 273429 - protein, 15 aa, Artificial Sequence
  Description of Artificial Sequence: Synthetic peptide
  Seed: SIGKVCRTLLAKSVF
SIVKVMRNLLNKSVF

SEQ ID NO: 273430 - protein, 15 aa, Artificial Sequence
  Description of Artificial Sequence: Synthetic peptide
  Seed: SIGKVCRTLLAKSVF
SIVKVMRNLLPKSVF

SEQ ID NO: 273431 - protein, 15 aa, Artificial Sequence
  Description of Artificial Sequence: Synthetic peptide
  Seed: SIGKVCRTLLAKSVF
SIVKVMRNLLQKSVF

SEQ ID NO: 273432 - protein, 15 aa, Artificial Sequence
  Description of Artificial Sequence: Synthetic peptide
  Seed: SIGKVCRTLLAKSVF
SIVKVMRNLLRKSVF

SEQ ID NO: 273433 - protein, 15 aa, Artificial Sequence
  Description of Artificial Sequence: Synthetic peptide
  Seed: SIGKVCRTLLAKSVF
SIVKVMRNLLSKSVF

SEQ ID NO: 273434 - protein, 15 aa, Artificial Sequence
  Description of Artificial Sequence: Synthetic peptide
  Seed: SIGKVCRTLLAKSVF
SIVKVMRNLLTKSVF

SEQ ID NO: 273435 - protein, 15 aa, Artificial Sequence
  Description of Artificial Sequence: Synthetic peptide
  Seed: SIGKVCRTLLAKSVF
SIVKVMRNLLVKSVF

SEQ ID NO: 273436 - protein, 15 aa, Artificial Sequence
  Description of Artificial Sequence: Synthetic peptide
  Seed: SIGKVCRTLLAKSVF
SIVKVMRNLLYKSVF

SEQ ID NO: 273437 - protein, 15 aa, Artificial Sequence
  Description of Artificial Sequence: Synthetic peptide
  Seed: SIGKVCRTLLAKSVF
SIVKVMRPLLAKSVF

SEQ ID NO: 273438 - protein, 15 aa, Artificial Sequence
  Description of Artificial Sequence: Synthetic peptide
  Seed: SIGKVCRTLLAKSVF
SIVKVMRPLLEKSVF

SEQ ID NO: 273439 - protein, 15 aa, Artificial Sequence
  Description of Artificial Sequence: Synthetic peptide
  Seed: SIGKVCRTLLAKSVF
SIVKVMRPLLGKSVF

SEQ ID NO: 273440 - protein, 15 aa, Artificial Sequence
  Description of Artificial Sequence: Synthetic peptide
  Seed: SIGKVCRTLLAKSVF
SIVKVMRPLLHKSVF

SEQ ID NO: 273441 - protein, 15 aa, Artificial Sequence
  Description of Artificial Sequence: Synthetic peptide
  Seed: SIGKVCRTLLAKSVF
SIVKVMRPLLIKSVF

SEQ ID NO: 273442 - protein, 15 aa, Artificial Sequence
  Description of Artificial Sequence: Synthetic peptide
  Seed: SIGKVCRTLLAKSVF
SIVKVMRPLLLKSVF

SEQ ID NO: 273443 - protein, 15 aa, Artificial Sequence
  Description of Artificial Sequence: Synthetic peptide
  Seed: SIGKVCRTLLAKSVF
SIVKVMRPLLMKSVF

SEQ ID NO: 273444 - protein, 15 aa, Artificial Sequence
  Description of Artificial Sequence: Synthetic peptide
  Seed: SIGKVCRTLLAKSVF
SIVKVMRPLLNKSVF

SEQ ID NO: 273445 - protein, 15 aa, Artificial Sequence
  Description of Artificial Sequence: Synthetic peptide
  Seed: SIGKVCRTLLAKSVF
SIVKVMRPLLPKSVF

SEQ ID NO: 273446 - protein, 15 aa, Artificial Sequence
  Description of Artificial Sequence: Synthetic peptide
  Seed: SIGKVCRTLLAKSVF
SIVKVMRPLLQKSVF

SEQ ID NO: 273447 - protein, 15 aa, Artificial Sequence
  Description of Artificial Sequence: Synthetic peptide
  Seed: SIGKVCRTLLAKSVF
SIVKVMRPLLSKSVF

SEQ ID NO: 273448 - protein, 15 aa, Artificial Sequence
  Description of Artificial Sequence: Synthetic peptide
  Seed: SIGKVCRTLLAKSVF
SIVKVMRPLLTKSVF

SEQ ID NO: 273449 - protein, 15 aa, Artificial Sequence
  Description of Artificial Sequence: Synthetic peptide
  Seed: SIGKVCRTLLAKSVF
SIVKVMRPLLVKSVF

SEQ ID NO: 273450 - protein, 15 aa, Artificial Sequence
  Description of Artificial Sequence: Synthetic peptide
  Seed: SIGKVCRTLLAKSVF
SIVKVMRPLLYKSVF

SEQ ID NO: 273451 - protein, 15 aa, Artificial Sequence
  Description of Artificial Sequence: Synthetic peptide
  Seed: SIGKVCRTLLAKSVF
SIVKVMRQLLAKSVF

SEQ ID NO: 273452 - protein, 15 aa, Artificial Sequence
  Description of Artificial Sequence: Synthetic peptide
  Seed: SIGKVCRTLLAKSVF
SIVKVMRQLLGKSVF

SEQ ID NO: 273453 - protein, 15 aa, Artificial Sequence
  Description of Artificial Sequence: Synthetic peptide
  Seed: SIGKVCRTLLAKSVF
SIVKVMRQLLHKSVF

SEQ ID NO: 273454 - protein, 15 aa, Artificial Sequence
  Description of Artificial Sequence: Synthetic peptide
  Seed: SIGKVCRTLLAKSVF
SIVKVMRQLLKKSVF

SEQ ID NO: 273455 - protein, 15 aa, Artificial Sequence
  Description of Artificial Sequence: Synthetic peptide
  Seed: SIGKVCRTLLAKSVF
SIVKVMRQLLNKSVF

SEQ ID NO: 273456 - protein, 15 aa, Artificial Sequence
  Description of Artificial Sequence: Synthetic peptide
  Seed: SIGKVCRTLLAKSVF
SIVKVMRQLLPKSVF

SEQ ID NO: 273457 - protein, 15 aa, Artificial Sequence
  Description of Artificial Sequence: Synthetic peptide
  Seed: SIGKVCRTLLAKSVF
SIVKVMRQLLQKSVF

SEQ ID NO: 273458 - protein, 15 aa, Artificial Sequence
  Description of Artificial Sequence: Synthetic peptide
  Seed: SIGKVCRTLLAKSVF
SIVKVMRQLLRKSVF

SEQ ID NO: 273459 - protein, 15 aa, Artificial Sequence
  Description of Artificial Sequence: Synthetic peptide
  Seed: SIGKVCRTLLAKSVF
SIVKVMRQLLSKSVF

SEQ ID NO: 273460 - protein, 15 aa, Artificial Sequence
  Description of Artificial Sequence: Synthetic peptide
  Seed: SIGKVCRTLLAKSVF
SIVKVMRQLLTKSVF

SEQ ID NO: 273461 - protein, 15 aa, Artificial Sequence
  Description of Artificial Sequence: Synthetic peptide
  Seed: SIGKVCRTLLAKSVF
SIVKVMRRLLAKSVF

SEQ ID NO: 273462 - protein, 15 aa, Artificial Sequence
  Description of Artificial Sequence: Synthetic peptide
  Seed: SIGKVCRTLLAKSVF
SIVKVMRRLLCKSVF

SEQ ID NO: 273463 - protein, 15 aa, Artificial Sequence
  Description of Artificial Sequence: Synthetic peptide
  Seed: SIGKVCRTLLAKSVF
SIVKVMRRLLDKSVF

SEQ ID NO: 273464 - protein, 15 aa, Artificial Sequence
  Description of Artificial Sequence: Synthetic peptide
  Seed: SIGKVCRTLLAKSVF
SIVKVMRRLLEKSVF

SEQ ID NO: 273465 - protein, 15 aa, Artificial Sequence
  Description of Artificial Sequence: Synthetic peptide
  Seed: SIGKVCRTLLAKSVF
SIVKVMRRLLFKSVF

SEQ ID NO: 273466 - protein, 15 aa, Artificial Sequence
  Description of Artificial Sequence: Synthetic peptide
  Seed: SIGKVCRTLLAKSVF
SIVKVMRRLLGKSVF

SEQ ID NO: 273467 - protein, 15 aa, Artificial Sequence
  Description of Artificial Sequence: Synthetic peptide
  Seed: SIGKVCRTLLAKSVF
SIVKVMRRLLHKSVF

SEQ ID NO: 273468 - protein, 15 aa, Artificial Sequence
  Description of Artificial Sequence: Synthetic peptide
  Seed: SIGKVCRTLLAKSVF
SIVKVMRRLLIKSVF

SEQ ID NO: 273469 - protein, 15 aa, Artificial Sequence
  Description of Artificial Sequence: Synthetic peptide
  Seed: SIGKVCRTLLAKSVF
SIVKVMRRLLKKSVF

SEQ ID NO: 273470 - protein, 15 aa, Artificial Sequence
  Description of Artificial Sequence: Synthetic peptide
  Seed: SIGKVCRTLLAKSVF
SIVKVMRRLLLKSVF

SEQ ID NO: 273471 - protein, 15 aa, Artificial Sequence
  Description of Artificial Sequence: Synthetic peptide
  Seed: SIGKVCRTLLAKSVF
SIVKVMRRLLMKSVF

SEQ ID NO: 273472 - protein, 15 aa, Artificial Sequence
  Description of Artificial Sequence: Synthetic peptide
  Seed: SIGKVCRTLLAKSVF
SIVKVMRRLLNKSVF

SEQ ID NO: 273473 - protein, 15 aa, Artificial Sequence
  Description of Artificial Sequence: Synthetic peptide
  Seed: SIGKVCRTLLAKSVF
SIVKVMRRLLPKSVF

SEQ ID NO: 273474 - protein, 15 aa, Artificial Sequence
  Description of Artificial Sequence: Synthetic peptide
  Seed: SIGKVCRTLLAKSVF
SIVKVMRRLLQKSVF

SEQ ID NO: 273475 - protein, 15 aa, Artificial Sequence
  Description of Artificial Sequence: Synthetic peptide
  Seed: SIGKVCRTLLAKSVF
SIVKVMRRLLRKSVF

SEQ ID NO: 273476 - protein, 15 aa, Artificial Sequence
  Description of Artificial Sequence: Synthetic peptide
  Seed: SIGKVCRTLLAKSVF
SIVKVMRRLLSKSVF

SEQ ID NO: 273477 - protein, 15 aa, Artificial Sequence
  Description of Artificial Sequence: Synthetic peptide
  Seed: SIGKVCRTLLAKSVF
SIVKVMRRLLTKSVF

SEQ ID NO: 273478 - protein, 15 aa, Artificial Sequence
  Description of Artificial Sequence: Synthetic peptide
  Seed: SIGKVCRTLLAKSVF
SIVKVMRRLLVKSVF

SEQ ID NO: 273479 - protein, 15 aa, Artificial Sequence
  Description of Artificial Sequence: Synthetic peptide
  Seed: SIGKVCRTLLAKSVF
SIVKVMRRLLWKSVF

SEQ ID NO: 273480 - protein, 15 aa, Artificial Sequence
  Description of Artificial Sequence: Synthetic peptide
  Seed: SIGKVCRTLLAKSVF
SIVKVMRRLLYKSVF

SEQ ID NO: 273481 - protein, 15 aa, Artificial Sequence
  Description of Artificial Sequence: Synthetic peptide
  Seed: SIGKVCRTLLAKSVF
SIVKVMRSLLAKSVF

SEQ ID NO: 273482 - protein, 15 aa, Artificial Sequence
  Description of Artificial Sequence: Synthetic peptide
  Seed: SIGKVCRTLLAKSVF
SIVKVMRSLLDKSVF

SEQ ID NO: 273483 - protein, 15 aa, Artificial Sequence
  Description of Artificial Sequence: Synthetic peptide
  Seed: SIGKVCRTLLAKSVF
SIVKVMRSLLEKSVF

SEQ ID NO: 273484 - protein, 15 aa, Artificial Sequence
  Description of Artificial Sequence: Synthetic peptide
  Seed: SIGKVCRTLLAKSVF
SIVKVMRSLLGKSVF

SEQ ID NO: 273485 - protein, 15 aa, Artificial Sequence
  Description of Artificial Sequence: Synthetic peptide
  Seed: SIGKVCRTLLAKSVF
SIVKVMRSLLHKSVF

SEQ ID NO: 273486 - protein, 15 aa, Artificial Sequence
  Description of Artificial Sequence: Synthetic peptide
  Seed: SIGKVCRTLLAKSVF
SIVKVMRSLLIKSVF

SEQ ID NO: 273487 - protein, 15 aa, Artificial Sequence
  Description of Artificial Sequence: Synthetic peptide
  Seed: SIGKVCRTLLAKSVF
SIVKVMRSLLKKSVF

SEQ ID NO: 273488 - protein, 15 aa, Artificial Sequence
  Description of Artificial Sequence: Synthetic peptide
  Seed: SIGKVCRTLLAKSVF
SIVKVMRSLLLKSVF

SEQ ID NO: 273489 - protein, 15 aa, Artificial Sequence
  Description of Artificial Sequence: Synthetic peptide
  Seed: SIGKVCRTLLAKSVF
SIVKVMRSLLMKSVF

SEQ ID NO: 273490 - protein, 15 aa, Artificial Sequence
  Description of Artificial Sequence: Synthetic peptide
  Seed: SIGKVCRTLLAKSVF
SIVKVMRSLLNKSVF

SEQ ID NO: 273491 - protein, 15 aa, Artificial Sequence
  Description of Artificial Sequence: Synthetic peptide
  Seed: SIGKVCRTLLAKSVF
SIVKVMRSLLPKSVF

SEQ ID NO: 273492 - protein, 15 aa, Artificial Sequence
  Description of Artificial Sequence: Synthetic peptide
  Seed: SIGKVCRTLLAKSVF
SIVKVMRSLLQKSVF

SEQ ID NO: 273493 - protein, 15 aa, Artificial Sequence
  Description of Artificial Sequence: Synthetic peptide
  Seed: SIGKVCRTLLAKSVF
SIVKVMRSLLRKSVF

SEQ ID NO: 273494 - protein, 15 aa, Artificial Sequence
  Description of Artificial Sequence: Synthetic peptide
  Seed: SIGKVCRTLLAKSVF
SIVKVMRSLLSKSVF

SEQ ID NO: 273495 - protein, 15 aa, Artificial Sequence
  Description of Artificial Sequence: Synthetic peptide
  Seed: SIGKVCRTLLAKSVF
SIVKVMRSLLTKSVF

SEQ ID NO: 273496 - protein, 15 aa, Artificial Sequence
  Description of Artificial Sequence: Synthetic peptide
  Seed: SIGKVCRTLLAKSVF
SIVKVMRSLLVKSVF

SEQ ID NO: 273497 - protein, 15 aa, Artificial Sequence
  Description of Artificial Sequence: Synthetic peptide
  Seed: SIGKVCRTLLAKSVF
SIVKVMRSLLYKSVF

SEQ ID NO: 273498 - protein, 15 aa, Artificial Sequence
  Description of Artificial Sequence: Synthetic peptide
  Seed: SIGKVCRTLLAKSVF
SIVKVMRTLLAKSVF

SEQ ID NO: 273499 - protein, 15 aa, Artificial Sequence
  Description of Artificial Sequence: Synthetic peptide
  Seed: SIGKVCRTLLAKSVF
SIVKVMRTLLDKSVF

SEQ ID NO: 273500 - protein, 15 aa, Artificial Sequence
  Description of Artificial Sequence: Synthetic peptide
  Seed: SIGKVCRTLLAKSVF
SIVKVMRTLLEKSVF

SEQ ID NO: 273501 - protein, 15 aa, Artificial Sequence
  Description of Artificial Sequence: Synthetic peptide
  Seed: SIGKVCRTLLAKSVF
SIVKVMRTLLGKSVF

SEQ ID NO: 273502 - protein, 15 aa, Artificial Sequence
  Description of Artificial Sequence: Synthetic peptide
  Seed: SIGKVCRTLLAKSVF
SIVKVMRTLLHKSVF

SEQ ID NO: 273503 - protein, 15 aa, Artificial Sequence
  Description of Artificial Sequence: Synthetic peptide
  Seed: SIGKVCRTLLAKSVF
SIVKVMRTLLIKSVF

SEQ ID NO: 273504 - protein, 15 aa, Artificial Sequence
  Description of Artificial Sequence: Synthetic peptide
  Seed: SIGKVCRTLLAKSVF
SIVKVMRTLLKKSVF

SEQ ID NO: 273505 - protein, 15 aa, Artificial Sequence
  Description of Artificial Sequence: Synthetic peptide
  Seed: SIGKVCRTLLAKSVF
SIVKVMRTLLLKSVF

SEQ ID NO: 273506 - protein, 15 aa, Artificial Sequence
  Description of Artificial Sequence: Synthetic peptide
  Seed: SIGKVCRTLLAKSVF
SIVKVMRTLLMKSVF

SEQ ID NO: 273507 - protein, 15 aa, Artificial Sequence
  Description of Artificial Sequence: Synthetic peptide
  Seed: SIGKVCRTLLAKSVF
SIVKVMRTLLNKSVF

SEQ ID NO: 273508 - protein, 15 aa, Artificial Sequence
  Description of Artificial Sequence: Synthetic peptide
  Seed: SIGKVCRTLLAKSVF
SIVKVMRTLLPKSVF

SEQ ID NO: 273509 - protein, 15 aa, Artificial Sequence
  Description of Artificial Sequence: Synthetic peptide
  Seed: SIGKVCRTLLAKSVF
SIVKVMRTLLQKSVF

SEQ ID NO: 273510 - protein, 15 aa, Artificial Sequence
  Description of Artificial Sequence: Synthetic peptide
  Seed: SIGKVCRTLLAKSVF
SIVKVMRTLLRKSVF

SEQ ID NO: 273511 - protein, 15 aa, Artificial Sequence
  Description of Artificial Sequence: Synthetic peptide
  Seed: SIGKVCRTLLAKSVF
SIVKVMRTLLSKSVF

SEQ ID NO: 273512 - protein, 15 aa, Artificial Sequence
  Description of Artificial Sequence: Synthetic peptide
  Seed: SIGKVCRTLLAKSVF
SIVKVMRTLLTKSVF

SEQ ID NO: 273513 - protein, 15 aa, Artificial Sequence
  Description of Artificial Sequence: Synthetic peptide
  Seed: SIGKVCRTLLAKSVF
SIVKVMRTLLVKSVF

SEQ ID NO: 273514 - protein, 15 aa, Artificial Sequence
  Description of Artificial Sequence: Synthetic peptide
  Seed: SIGKVCRTLLAKSVF
SIVKVMRTLLYKSVF

SEQ ID NO: 273515 - protein, 15 aa, Artificial Sequence
  Description of Artificial Sequence: Synthetic peptide
  Seed: SIGKVCRTLLAKSVF
SIVKVMRVLLAKSVF

SEQ ID NO: 273516 - protein, 15 aa, Artificial Sequence
  Description of Artificial Sequence: Synthetic peptide
  Seed: SIGKVCRTLLAKSVF
SIVKVMRVLLHKSVF

SEQ ID NO: 273517 - protein, 15 aa, Artificial Sequence
  Description of Artificial Sequence: Synthetic peptide
  Seed: SIGKVCRTLLAKSVF
SIVKVMRVLLNKSVF

SEQ ID NO: 273518 - protein, 15 aa, Artificial Sequence
  Description of Artificial Sequence: Synthetic peptide
  Seed: SIGKVCRTLLAKSVF
SIVKVMRVLLPKSVF

SEQ ID NO: 273519 - protein, 15 aa, Artificial Sequence
  Description of Artificial Sequence: Synthetic peptide
  Seed: SIGKVCRTLLAKSVF
SIVKVMRVLLQKSVF

SEQ ID NO: 273520 - protein, 15 aa, Artificial Sequence
  Description of Artificial Sequence: Synthetic peptide
  Seed: SIGKVCRTLLAKSVF
SIVKVMRVLLSKSVF

SEQ ID NO: 273521 - protein, 15 aa, Artificial Sequence
  Description of Artificial Sequence: Synthetic peptide
  Seed: SIGKVCRTLLAKSVF
SIVKVMRYLLAKSVF

SEQ ID NO: 273522 - protein, 15 aa, Artificial Sequence
  Description of Artificial Sequence: Synthetic peptide
  Seed: SIGKVCRTLLAKSVF
SIVKVMRYLLSKSVF

SEQ ID NO: 273523 - protein, 15 aa, Artificial Sequence
  Description of Artificial Sequence: Synthetic peptide
  Seed: SIGKVCRTLLAKSVF
SIVKVNRALLGKSVF

SEQ ID NO: 273524 - protein, 15 aa, Artificial Sequence
  Description of Artificial Sequence: Synthetic peptide
  Seed: SIGKVCRTLLAKSVF
SIVKVNRALLQKSVF

SEQ ID NO: 273525 - protein, 15 aa, Artificial Sequence
  Description of Artificial Sequence: Synthetic peptide
  Seed: SIGKVCRTLLAKSVF
SIVKVNRHLLAKSVF

SEQ ID NO: 273526 - protein, 15 aa, Artificial Sequence
  Description of Artificial Sequence: Synthetic peptide
  Seed: SIGKVCRTLLAKSVF
SIVKVNRHLLQKSVF

SEQ ID NO: 273527 - protein, 15 aa, Artificial Sequence
  Description of Artificial Sequence: Synthetic peptide
  Seed: SIGKVCRTLLAKSVF
SIVKVNRHLLSKSVF

SEQ ID NO: 273528 - protein, 15 aa, Artificial Sequence
  Description of Artificial Sequence: Synthetic peptide
  Seed: SIGKVCRTLLAKSVF
SIVKVNRKLLAKSVF

SEQ ID NO: 273529 - protein, 15 aa, Artificial Sequence
  Description of Artificial Sequence: Synthetic peptide
  Seed: SIGKVCRTLLAKSVF
SIVKVNRKLLCKSVF

SEQ ID NO: 273530 - protein, 15 aa, Artificial Sequence
  Description of Artificial Sequence: Synthetic peptide
  Seed: SIGKVCRTLLAKSVF
SIVKVNRKLLFKSVF

SEQ ID NO: 273531 - protein, 15 aa, Artificial Sequence
  Description of Artificial Sequence: Synthetic peptide
  Seed: SIGKVCRTLLAKSVF
SIVKVNRKLLGKSVF

SEQ ID NO: 273532 - protein, 15 aa, Artificial Sequence
  Description of Artificial Sequence: Synthetic peptide
  Seed: SIGKVCRTLLAKSVF
SIVKVNRKLLHKSVF

SEQ ID NO: 273533 - protein, 15 aa, Artificial Sequence
  Description of Artificial Sequence: Synthetic peptide
  Seed: SIGKVCRTLLAKSVF
SIVKVNRKLLIKSVF

SEQ ID NO: 273534 - protein, 15 aa, Artificial Sequence
  Description of Artificial Sequence: Synthetic peptide
  Seed: SIGKVCRTLLAKSVF
SIVKVNRKLLKKSVF

SEQ ID NO: 273535 - protein, 15 aa, Artificial Sequence
  Description of Artificial Sequence: Synthetic peptide
  Seed: SIGKVCRTLLAKSVF
SIVKVNRKLLLKSVF

SEQ ID NO: 273536 - protein, 15 aa, Artificial Sequence
  Description of Artificial Sequence: Synthetic peptide
  Seed: SIGKVCRTLLAKSVF
SIVKVNRKLLMKSVF

SEQ ID NO: 273537 - protein, 15 aa, Artificial Sequence
  Description of Artificial Sequence: Synthetic peptide
  Seed: SIGKVCRTLLAKSVF
SIVKVNRKLLNKSVF

SEQ ID NO: 273538 - protein, 15 aa, Artificial Sequence
  Description of Artificial Sequence: Synthetic peptide
  Seed: SIGKVCRTLLAKSVF
SIVKVNRKLLPKSVF

SEQ ID NO: 273539 - protein, 15 aa, Artificial Sequence
  Description of Artificial Sequence: Synthetic peptide
  Seed: SIGKVCRTLLAKSVF
SIVKVNRKLLQKSVF

SEQ ID NO: 273540 - protein, 15 aa, Artificial Sequence
  Description of Artificial Sequence: Synthetic peptide
  Seed: SIGKVCRTLLAKSVF
SIVKVNRKLLRKSVF

SEQ ID NO: 273541 - protein, 15 aa, Artificial Sequence
  Description of Artificial Sequence: Synthetic peptide
  Seed: SIGKVCRTLLAKSVF
SIVKVNRKLLSKSVF

SEQ ID NO: 273542 - protein, 15 aa, Artificial Sequence
  Description of Artificial Sequence: Synthetic peptide
  Seed: SIGKVCRTLLAKSVF
SIVKVNRKLLTKSVF

SEQ ID NO: 273543 - protein, 15 aa, Artificial Sequence
  Description of Artificial Sequence: Synthetic peptide
  Seed: SIGKVCRTLLAKSVF
SIVKVNRKLLVKSVF

SEQ ID NO: 273544 - protein, 15 aa, Artificial Sequence
  Description of Artificial Sequence: Synthetic peptide
  Seed: SIGKVCRTLLAKSVF
SIVKVNRKLLYKSVF

SEQ ID NO: 273545 - protein, 15 aa, Artificial Sequence
  Description of Artificial Sequence: Synthetic peptide
  Seed: SIGKVCRTLLAKSVF
SIVKVNRNLLAKSVF

SEQ ID NO: 273546 - protein, 15 aa, Artificial Sequence
  Description of Artificial Sequence: Synthetic peptide
  Seed: SIGKVCRTLLAKSVF
SIVKVNRRLLAKSVF

SEQ ID NO: 273547 - protein, 15 aa, Artificial Sequence
  Description of Artificial Sequence: Synthetic peptide
  Seed: SIGKVCRTLLAKSVF
SIVKVNRRLLCKSVF

SEQ ID NO: 273548 - protein, 15 aa, Artificial Sequence
  Description of Artificial Sequence: Synthetic peptide
  Seed: SIGKVCRTLLAKSVF
SIVKVNRRLLDKSVF

SEQ ID NO: 273549 - protein, 15 aa, Artificial Sequence
  Description of Artificial Sequence: Synthetic peptide
  Seed: SIGKVCRTLLAKSVF
SIVKVNRRLLEKSVF

SEQ ID NO: 273550 - protein, 15 aa, Artificial Sequence
  Description of Artificial Sequence: Synthetic peptide
  Seed: SIGKVCRTLLAKSVF
SIVKVNRRLLGKSVF

SEQ ID NO: 273551 - protein, 15 aa, Artificial Sequence
  Description of Artificial Sequence: Synthetic peptide
  Seed: SIGKVCRTLLAKSVF
SIVKVNRRLLHKSVF

SEQ ID NO: 273552 - protein, 15 aa, Artificial Sequence
  Description of Artificial Sequence: Synthetic peptide
  Seed: SIGKVCRTLLAKSVF
SIVKVNRRLLIKSVF

SEQ ID NO: 273553 - protein, 15 aa, Artificial Sequence
  Description of Artificial Sequence: Synthetic peptide
  Seed: SIGKVCRTLLAKSVF
SIVKVNRRLLLKSVF

SEQ ID NO: 273554 - protein, 15 aa, Artificial Sequence
  Description of Artificial Sequence: Synthetic peptide
  Seed: SIGKVCRTLLAKSVF
SIVKVNRRLLMKSVF

SEQ ID NO: 273555 - protein, 15 aa, Artificial Sequence
  Description of Artificial Sequence: Synthetic peptide
  Seed: SIGKVCRTLLAKSVF
SIVKVNRRLLNKSVF

SEQ ID NO: 273556 - protein, 15 aa, Artificial Sequence
  Description of Artificial Sequence: Synthetic peptide
  Seed: SIGKVCRTLLAKSVF
SIVKVNRRLLQKSVF

SEQ ID NO: 273557 - protein, 15 aa, Artificial Sequence
  Description of Artificial Sequence: Synthetic peptide
  Seed: SIGKVCRTLLAKSVF
SIVKVNRRLLSKSVF

SEQ ID NO: 273558 - protein, 15 aa, Artificial Sequence
  Description of Artificial Sequence: Synthetic peptide
  Seed: SIGKVCRTLLAKSVF
SIVKVNRRLLTKSVF

SEQ ID NO: 273559 - protein, 15 aa, Artificial Sequence
  Description of Artificial Sequence: Synthetic peptide
  Seed: SIGKVCRTLLAKSVF
SIVKVNRRLLVKSVF

SEQ ID NO: 273560 - protein, 15 aa, Artificial Sequence
  Description of Artificial Sequence: Synthetic peptide
  Seed: SIGKVCRTLLAKSVF
SIVKVNRRLLYKSVF

SEQ ID NO: 273561 - protein, 15 aa, Artificial Sequence
  Description of Artificial Sequence: Synthetic peptide
  Seed: SIGKVCRTLLAKSVF
SIVKVNRSLLAKSVF

SEQ ID NO: 273562 - protein, 15 aa, Artificial Sequence
  Description of Artificial Sequence: Synthetic peptide
  Seed: SIGKVCRTLLAKSVF
SIVKVNRSLLSKSVF

SEQ ID NO: 273563 - protein, 15 aa, Artificial Sequence
  Description of Artificial Sequence: Synthetic peptide
  Seed: SIGKVCRTLLAKSVF
SIVKVNRTLLAKSVF

SEQ ID NO: 273564 - protein, 15 aa, Artificial Sequence
  Description of Artificial Sequence: Synthetic peptide
  Seed: SIGKVCRTLLAKSVF
SIVKVNRTLLSKSVF

SEQ ID NO: 273565 - protein, 15 aa, Artificial Sequence
  Description of Artificial Sequence: Synthetic peptide
  Seed: SIGKVCRTLLAKSVF
SIVKVNRVLLAKSVF

SEQ ID NO: 273566 - protein, 15 aa, Artificial Sequence
  Description of Artificial Sequence: Synthetic peptide
  Seed: SIGKVCRTLLAKSVF
SIVKVNRVLLSKSVF

SEQ ID NO: 273567 - protein, 15 aa, Artificial Sequence
  Description of Artificial Sequence: Synthetic peptide
  Seed: SIGKVCRTLLAKSVF
SIVKVQRALLAKSVF

SEQ ID NO: 273568 - protein, 15 aa, Artificial Sequence
  Description of Artificial Sequence: Synthetic peptide
  Seed: SIGKVCRTLLAKSVF
SIVKVQRALLGKSVF

SEQ ID NO: 273569 - protein, 15 aa, Artificial Sequence
  Description of Artificial Sequence: Synthetic peptide
  Seed: SIGKVCRTLLAKSVF
SIVKVQRALLQKSVF

SEQ ID NO: 273570 - protein, 15 aa, Artificial Sequence
  Description of Artificial Sequence: Synthetic peptide
  Seed: SIGKVCRTLLAKSVF
SIVKVQRALLSKSVF

SEQ ID NO: 273571 - protein, 15 aa, Artificial Sequence
  Description of Artificial Sequence: Synthetic peptide
  Seed: SIGKVCRTLLAKSVF
SIVKVQRHLLAKSVF

SEQ ID NO: 273572 - protein, 15 aa, Artificial Sequence
  Description of Artificial Sequence: Synthetic peptide
  Seed: SIGKVCRTLLAKSVF
SIVKVQRHLLGKSVF

SEQ ID NO: 273573 - protein, 15 aa, Artificial Sequence
  Description of Artificial Sequence: Synthetic peptide
  Seed: SIGKVCRTLLAKSVF
SIVKVQRHLLHKSVF

SEQ ID NO: 273574 - protein, 15 aa, Artificial Sequence
  Description of Artificial Sequence: Synthetic peptide
  Seed: SIGKVCRTLLAKSVF
SIVKVQRHLLQKSVF

SEQ ID NO: 273575 - protein, 15 aa, Artificial Sequence
  Description of Artificial Sequence: Synthetic peptide
  Seed: SIGKVCRTLLAKSVF
SIVKVQRHLLSKSVF

SEQ ID NO: 273576 - protein, 15 aa, Artificial Sequence
  Description of Artificial Sequence: Synthetic peptide
  Seed: SIGKVCRTLLAKSVF
SIVKVQRILLGKSVF

SEQ ID NO: 273577 - protein, 15 aa, Artificial Sequence
  Description of Artificial Sequence: Synthetic peptide
  Seed: SIGKVCRTLLAKSVF
SIVKVQRILLQKSVF

SEQ ID NO: 273578 - protein, 15 aa, Artificial Sequence
  Description of Artificial Sequence: Synthetic peptide
  Seed: SIGKVCRTLLAKSVF
SIVKVQRILLSKSVF

SEQ ID NO: 273579 - protein, 15 aa, Artificial Sequence
  Description of Artificial Sequence: Synthetic peptide
  Seed: SIGKVCRTLLAKSVF
SIVKVQRKLLAKSVF

SEQ ID NO: 273580 - protein, 15 aa, Artificial Sequence
  Description of Artificial Sequence: Synthetic peptide
  Seed: SIGKVCRTLLAKSVF
SIVKVQRKLLCKSVF

SEQ ID NO: 273581 - protein, 15 aa, Artificial Sequence
  Description of Artificial Sequence: Synthetic peptide
  Seed: SIGKVCRTLLAKSVF
SIVKVQRKLLDKSVF

SEQ ID NO: 273582 - protein, 15 aa, Artificial Sequence
  Description of Artificial Sequence: Synthetic peptide
  Seed: SIGKVCRTLLAKSVF
SIVKVQRKLLEKSVF

SEQ ID NO: 273583 - protein, 15 aa, Artificial Sequence
  Description of Artificial Sequence: Synthetic peptide
  Seed: SIGKVCRTLLAKSVF
SIVKVQRKLLFKSVF

SEQ ID NO: 273584 - protein, 15 aa, Artificial Sequence
  Description of Artificial Sequence: Synthetic peptide
  Seed: SIGKVCRTLLAKSVF
SIVKVQRKLLGKSVF

SEQ ID NO: 273585 - protein, 15 aa, Artificial Sequence
  Description of Artificial Sequence: Synthetic peptide
  Seed: SIGKVCRTLLAKSVF
SIVKVQRKLLHKSVF

SEQ ID NO: 273586 - protein, 15 aa, Artificial Sequence
  Description of Artificial Sequence: Synthetic peptide
  Seed: SIGKVCRTLLAKSVF
SIVKVQRKLLIKSVF

SEQ ID NO: 273587 - protein, 15 aa, Artificial Sequence
  Description of Artificial Sequence: Synthetic peptide
  Seed: SIGKVCRTLLAKSVF
SIVKVQRKLLKKSVF

SEQ ID NO: 273588 - protein, 15 aa, Artificial Sequence
  Description of Artificial Sequence: Synthetic peptide
  Seed: SIGKVCRTLLAKSVF
SIVKVQRKLLLKSVF

SEQ ID NO: 273589 - protein, 15 aa, Artificial Sequence
  Description of Artificial Sequence: Synthetic peptide
  Seed: SIGKVCRTLLAKSVF
SIVKVQRKLLMKSVF

SEQ ID NO: 273590 - protein, 15 aa, Artificial Sequence
  Description of Artificial Sequence: Synthetic peptide
  Seed: SIGKVCRTLLAKSVF
SIVKVQRKLLNKSVF

SEQ ID NO: 273591 - protein, 15 aa, Artificial Sequence
  Description of Artificial Sequence: Synthetic peptide
  Seed: SIGKVCRTLLAKSVF
SIVKVQRKLLPKSVF

SEQ ID NO: 273592 - protein, 15 aa, Artificial Sequence
  Description of Artificial Sequence: Synthetic peptide
  Seed: SIGKVCRTLLAKSVF
SIVKVQRKLLQKSVF

SEQ ID NO: 273593 - protein, 15 aa, Artificial Sequence
  Description of Artificial Sequence: Synthetic peptide
  Seed: SIGKVCRTLLAKSVF
SIVKVQRKLLRKSVF

SEQ ID NO: 273594 - protein, 15 aa, Artificial Sequence
  Description of Artificial Sequence: Synthetic peptide
  Seed: SIGKVCRTLLAKSVF
SIVKVQRKLLSKSVF

SEQ ID NO: 273595 - protein, 15 aa, Artificial Sequence
  Description of Artificial Sequence: Synthetic peptide
  Seed: SIGKVCRTLLAKSVF
SIVKVQRKLLTKSVF

SEQ ID NO: 273596 - protein, 15 aa, Artificial Sequence
  Description of Artificial Sequence: Synthetic peptide
  Seed: SIGKVCRTLLAKSVF
SIVKVQRKLLVKSVF

SEQ ID NO: 273597 - protein, 15 aa, Artificial Sequence
  Description of Artificial Sequence: Synthetic peptide
  Seed: SIGKVCRTLLAKSVF
SIVKVQRKLLWKSVF

SEQ ID NO: 273598 - protein, 15 aa, Artificial Sequence
  Description of Artificial Sequence: Synthetic peptide
  Seed: SIGKVCRTLLAKSVF
SIVKVQRKLLYKSVF

SEQ ID NO: 273599 - protein, 15 aa, Artificial Sequence
  Description of Artificial Sequence: Synthetic peptide
  Seed: SIGKVCRTLLAKSVF
SIVKVQRNLLAKSVF

SEQ ID NO: 273600 - protein, 15 aa, Artificial Sequence
  Description of Artificial Sequence: Synthetic peptide
  Seed: SIGKVCRTLLAKSVF
SIVKVQRNLLGKSVF

SEQ ID NO: 273601 - protein, 15 aa, Artificial Sequence
  Description of Artificial Sequence: Synthetic peptide
  Seed: SIGKVCRTLLAKSVF
SIVKVQRNLLQKSVF

SEQ ID NO: 273602 - protein, 15 aa, Artificial Sequence
  Description of Artificial Sequence: Synthetic peptide
  Seed: SIGKVCRTLLAKSVF
SIVKVQRNLLSKSVF

SEQ ID NO: 273603 - protein, 15 aa, Artificial Sequence
  Description of Artificial Sequence: Synthetic peptide
  Seed: SIGKVCRTLLAKSVF
SIVKVQRPLLAKSVF

SEQ ID NO: 273604 - protein, 15 aa, Artificial Sequence
  Description of Artificial Sequence: Synthetic peptide
  Seed: SIGKVCRTLLAKSVF
SIVKVQRPLLGKSVF

SEQ ID NO: 273605 - protein, 15 aa, Artificial Sequence
  Description of Artificial Sequence: Synthetic peptide
  Seed: SIGKVCRTLLAKSVF
SIVKVQRPLLQKSVF

SEQ ID NO: 273606 - protein, 15 aa, Artificial Sequence
  Description of Artificial Sequence: Synthetic peptide
  Seed: SIGKVCRTLLAKSVF
SIVKVQRPLLSKSVF

SEQ ID NO: 273607 - protein, 15 aa, Artificial Sequence
  Description of Artificial Sequence: Synthetic peptide
  Seed: SIGKVCRTLLAKSVF
SIVKVQRQLLAKSVF

SEQ ID NO: 273608 - protein, 15 aa, Artificial Sequence
  Description of Artificial Sequence: Synthetic peptide
  Seed: SIGKVCRTLLAKSVF
SIVKVQRQLLSKSVF

SEQ ID NO: 273609 - protein, 15 aa, Artificial Sequence
  Description of Artificial Sequence: Synthetic peptide
  Seed: SIGKVCRTLLAKSVF
SIVKVQRRLLAKSVF

SEQ ID NO: 273610 - protein, 15 aa, Artificial Sequence
  Description of Artificial Sequence: Synthetic peptide
  Seed: SIGKVCRTLLAKSVF
SIVKVQRRLLCKSVF

SEQ ID NO: 273611 - protein, 15 aa, Artificial Sequence
  Description of Artificial Sequence: Synthetic peptide
  Seed: SIGKVCRTLLAKSVF
SIVKVQRRLLDKSVF

SEQ ID NO: 273612 - protein, 15 aa, Artificial Sequence
  Description of Artificial Sequence: Synthetic peptide
  Seed: SIGKVCRTLLAKSVF
SIVKVQRRLLEKSVF

SEQ ID NO: 273613 - protein, 15 aa, Artificial Sequence
  Description of Artificial Sequence: Synthetic peptide
  Seed: SIGKVCRTLLAKSVF
SIVKVQRRLLFKSVF

SEQ ID NO: 273614 - protein, 15 aa, Artificial Sequence
  Description of Artificial Sequence: Synthetic peptide
  Seed: SIGKVCRTLLAKSVF
SIVKVQRRLLGKSVF

SEQ ID NO: 273615 - protein, 15 aa, Artificial Sequence
  Description of Artificial Sequence: Synthetic peptide
  Seed: SIGKVCRTLLAKSVF
SIVKVQRRLLHKSVF

SEQ ID NO: 273616 - protein, 15 aa, Artificial Sequence
  Description of Artificial Sequence: Synthetic peptide
  Seed: SIGKVCRTLLAKSVF
SIVKVQRRLLIKSVF

SEQ ID NO: 273617 - protein, 15 aa, Artificial Sequence
  Description of Artificial Sequence: Synthetic peptide
  Seed: SIGKVCRTLLAKSVF
SIVKVQRRLLKKSVF

SEQ ID NO: 273618 - protein, 15 aa, Artificial Sequence
  Description of Artificial Sequence: Synthetic peptide
  Seed: SIGKVCRTLLAKSVF
SIVKVQRRLLLKSVF

SEQ ID NO: 273619 - protein, 15 aa, Artificial Sequence
  Description of Artificial Sequence: Synthetic peptide
  Seed: SIGKVCRTLLAKSVF
SIVKVQRRLLMKSVF

SEQ ID NO: 273620 - protein, 15 aa, Artificial Sequence
  Description of Artificial Sequence: Synthetic peptide
  Seed: SIGKVCRTLLAKSVF
SIVKVQRRLLNKSVF

SEQ ID NO: 273621 - protein, 15 aa, Artificial Sequence
  Description of Artificial Sequence: Synthetic peptide
  Seed: SIGKVCRTLLAKSVF
SIVKVQRRLLPKSVF

SEQ ID NO: 273622 - protein, 15 aa, Artificial Sequence
  Description of Artificial Sequence: Synthetic peptide
  Seed: SIGKVCRTLLAKSVF
SIVKVQRRLLQKSVF

SEQ ID NO: 273623 - protein, 15 aa, Artificial Sequence
  Description of Artificial Sequence: Synthetic peptide
  Seed: SIGKVCRTLLAKSVF
SIVKVQRRLLRKSVF

SEQ ID NO: 273624 - protein, 15 aa, Artificial Sequence
  Description of Artificial Sequence: Synthetic peptide
  Seed: SIGKVCRTLLAKSVF
SIVKVQRRLLSKSVF

SEQ ID NO: 273625 - protein, 15 aa, Artificial Sequence
  Description of Artificial Sequence: Synthetic peptide
  Seed: SIGKVCRTLLAKSVF
SIVKVQRRLLTKSVF

SEQ ID NO: 273626 - protein, 15 aa, Artificial Sequence
  Description of Artificial Sequence: Synthetic peptide
  Seed: SIGKVCRTLLAKSVF
SIVKVQRRLLVKSVF

SEQ ID NO: 273627 - protein, 15 aa, Artificial Sequence
  Description of Artificial Sequence: Synthetic peptide
  Seed: SIGKVCRTLLAKSVF
SIVKVQRRLLYKSVF

SEQ ID NO: 273628 - protein, 15 aa, Artificial Sequence
  Description of Artificial Sequence: Synthetic peptide
  Seed: SIGKVCRTLLAKSVF
SIVKVQRSLLAKSVF

SEQ ID NO: 273629 - protein, 15 aa, Artificial Sequence
  Description of Artificial Sequence: Synthetic peptide
  Seed: SIGKVCRTLLAKSVF
SIVKVQRSLLGKSVF

SEQ ID NO: 273630 - protein, 15 aa, Artificial Sequence
  Description of Artificial Sequence: Synthetic peptide
  Seed: SIGKVCRTLLAKSVF
SIVKVQRSLLHKSVF

SEQ ID NO: 273631 - protein, 15 aa, Artificial Sequence
  Description of Artificial Sequence: Synthetic peptide
  Seed: SIGKVCRTLLAKSVF
SIVKVQRSLLQKSVF

SEQ ID NO: 273632 - protein, 15 aa, Artificial Sequence
  Description of Artificial Sequence: Synthetic peptide
  Seed: SIGKVCRTLLAKSVF
SIVKVQRSLLRKSVF

SEQ ID NO: 273633 - protein, 15 aa, Artificial Sequence
  Description of Artificial Sequence: Synthetic peptide
  Seed: SIGKVCRTLLAKSVF
SIVKVQRSLLSKSVF

SEQ ID NO: 273634 - protein, 15 aa, Artificial Sequence
  Description of Artificial Sequence: Synthetic peptide
  Seed: SIGKVCRTLLAKSVF
SIVKVQRSLLVKSVF

SEQ ID NO: 273635 - protein, 15 aa, Artificial Sequence
  Description of Artificial Sequence: Synthetic peptide
  Seed: SIGKVCRTLLAKSVF
SIVKVQRSLLYKSVF

SEQ ID NO: 273636 - protein, 15 aa, Artificial Sequence
  Description of Artificial Sequence: Synthetic peptide
  Seed: SIGKVCRTLLAKSVF
SIVKVQRTLLAKSVF

SEQ ID NO: 273637 - protein, 15 aa, Artificial Sequence
  Description of Artificial Sequence: Synthetic peptide
  Seed: SIGKVCRTLLAKSVF
SIVKVQRTLLGKSVF

SEQ ID NO: 273638 - protein, 15 aa, Artificial Sequence
  Description of Artificial Sequence: Synthetic peptide
  Seed: SIGKVCRTLLAKSVF
SIVKVQRTLLHKSVF

SEQ ID NO: 273639 - protein, 15 aa, Artificial Sequence
  Description of Artificial Sequence: Synthetic peptide
  Seed: SIGKVCRTLLAKSVF
SIVKVQRTLLKKSVF

SEQ ID NO: 273640 - protein, 15 aa, Artificial Sequence
  Description of Artificial Sequence: Synthetic peptide
  Seed: SIGKVCRTLLAKSVF
SIVKVQRTLLMKSVF

SEQ ID NO: 273641 - protein, 15 aa, Artificial Sequence
  Description of Artificial Sequence: Synthetic peptide
  Seed: SIGKVCRTLLAKSVF
SIVKVQRTLLQKSVF

SEQ ID NO: 273642 - protein, 15 aa, Artificial Sequence
  Description of Artificial Sequence: Synthetic peptide
  Seed: SIGKVCRTLLAKSVF
SIVKVQRTLLRKSVF

SEQ ID NO: 273643 - protein, 15 aa, Artificial Sequence
  Description of Artificial Sequence: Synthetic peptide
  Seed: SIGKVCRTLLAKSVF
SIVKVQRTLLSKSVF

SEQ ID NO: 273644 - protein, 15 aa, Artificial Sequence
  Description of Artificial Sequence: Synthetic peptide
  Seed: SIGKVCRTLLAKSVF
SIVKVQRTLLTKSVF

SEQ ID NO: 273645 - protein, 15 aa, Artificial Sequence
  Description of Artificial Sequence: Synthetic peptide
  Seed: SIGKVCRTLLAKSVF
SIVKVQRVLLAKSVF

SEQ ID NO: 273646 - protein, 15 aa, Artificial Sequence
  Description of Artificial Sequence: Synthetic peptide
  Seed: SIGKVCRTLLAKSVF
SIVKVQRVLLQKSVF

SEQ ID NO: 273647 - protein, 15 aa, Artificial Sequence
  Description of Artificial Sequence: Synthetic peptide
  Seed: SIGKVCRTLLAKSVF
SIVKVQRVLLRKSVF

SEQ ID NO: 273648 - protein, 15 aa, Artificial Sequence
  Description of Artificial Sequence: Synthetic peptide
  Seed: SIGKVCRTLLAKSVF
SIVKVQRVLLSKSVF

SEQ ID NO: 273649 - protein, 15 aa, Artificial Sequence
  Description of Artificial Sequence: Synthetic peptide
  Seed: SIGKVCRTLLAKSVF
SIVKVRRALLAKSVF

SEQ ID NO: 273650 - protein, 15 aa, Artificial Sequence
  Description of Artificial Sequence: Synthetic peptide
  Seed: SIGKVCRTLLAKSVF
SIVKVRRALLGKSVF

SEQ ID NO: 273651 - protein, 15 aa, Artificial Sequence
  Description of Artificial Sequence: Synthetic peptide
  Seed: SIGKVCRTLLAKSVF
SIVKVRRALLHKSVF

SEQ ID NO: 273652 - protein, 15 aa, Artificial Sequence
  Description of Artificial Sequence: Synthetic peptide
  Seed: SIGKVCRTLLAKSVF
SIVKVRRALLQKSVF

SEQ ID NO: 273653 - protein, 15 aa, Artificial Sequence
  Description of Artificial Sequence: Synthetic peptide
  Seed: SIGKVCRTLLAKSVF
SIVKVRRALLSKSVF

SEQ ID NO: 273654 - protein, 15 aa, Artificial Sequence
  Description of Artificial Sequence: Synthetic peptide
  Seed: SIGKVCRTLLAKSVF
SIVKVRRILLSKSVF

SEQ ID NO: 273655 - protein, 15 aa, Artificial Sequence
  Description of Artificial Sequence: Synthetic peptide
  Seed: SIGKVCRTLLAKSVF
SIVKVRRKLLAKSVF

SEQ ID NO: 273656 - protein, 15 aa, Artificial Sequence
  Description of Artificial Sequence: Synthetic peptide
  Seed: SIGKVCRTLLAKSVF
SIVKVRRKLLCKSVF

SEQ ID NO: 273657 - protein, 15 aa, Artificial Sequence
  Description of Artificial Sequence: Synthetic peptide
  Seed: SIGKVCRTLLAKSVF
SIVKVRRKLLGKSVF

SEQ ID NO: 273658 - protein, 15 aa, Artificial Sequence
  Description of Artificial Sequence: Synthetic peptide
  Seed: SIGKVCRTLLAKSVF
SIVKVRRKLLMKSVF

SEQ ID NO: 273659 - protein, 15 aa, Artificial Sequence
  Description of Artificial Sequence: Synthetic peptide
  Seed: SIGKVCRTLLAKSVF
SIVKVRRKLLQKSVF

SEQ ID NO: 273660 - protein, 15 aa, Artificial Sequence
  Description of Artificial Sequence: Synthetic peptide
  Seed: SIGKVCRTLLAKSVF
SIVKVRRKLLSKSVF

SEQ ID NO: 273661 - protein, 15 aa, Artificial Sequence
  Description of Artificial Sequence: Synthetic peptide
  Seed: SIGKVCRTLLAKSVF
SIVKVRRNLLGKSVF

SEQ ID NO: 273662 - protein, 15 aa, Artificial Sequence
  Description of Artificial Sequence: Synthetic peptide
  Seed: SIGKVCRTLLAKSVF
SIVKVRRNLLQKSVF

SEQ ID NO: 273663 - protein, 15 aa, Artificial Sequence
  Description of Artificial Sequence: Synthetic peptide
  Seed: SIGKVCRTLLAKSVF
SIVKVRRRLLAKSVF

SEQ ID NO: 273664 - protein, 15 aa, Artificial Sequence
  Description of Artificial Sequence: Synthetic peptide
  Seed: SIGKVCRTLLAKSVF
SIVKVRRRLLCKSVF

SEQ ID NO: 273665 - protein, 15 aa, Artificial Sequence
  Description of Artificial Sequence: Synthetic peptide
  Seed: SIGKVCRTLLAKSVF
SIVKVRRRLLGKSVF

SEQ ID NO: 273666 - protein, 15 aa, Artificial Sequence
  Description of Artificial Sequence: Synthetic peptide
  Seed: SIGKVCRTLLAKSVF
SIVKVRRRLLHKSVF

SEQ ID NO: 273667 - protein, 15 aa, Artificial Sequence
  Description of Artificial Sequence: Synthetic peptide
  Seed: SIGKVCRTLLAKSVF
SIVKVRRRLLQKSVF

SEQ ID NO: 273668 - protein, 15 aa, Artificial Sequence
  Description of Artificial Sequence: Synthetic peptide
  Seed: SIGKVCRTLLAKSVF
SIVKVRRRLLSKSVF

SEQ ID NO: 273669 - protein, 15 aa, Artificial Sequence
  Description of Artificial Sequence: Synthetic peptide
  Seed: SIGKVCRTLLAKSVF
SIVKVRRSLLAKSVF

SEQ ID NO: 273670 - protein, 15 aa, Artificial Sequence
  Description of Artificial Sequence: Synthetic peptide
  Seed: SIGKVCRTLLAKSVF
SIVKVRRSLLGKSVF

SEQ ID NO: 273671 - protein, 15 aa, Artificial Sequence
  Description of Artificial Sequence: Synthetic peptide
  Seed: SIGKVCRTLLAKSVF
SIVKVRRSLLHKSVF

SEQ ID NO: 273672 - protein, 15 aa, Artificial Sequence
  Description of Artificial Sequence: Synthetic peptide
  Seed: SIGKVCRTLLAKSVF
SIVKVRRSLLQKSVF

SEQ ID NO: 273673 - protein, 15 aa, Artificial Sequence
  Description of Artificial Sequence: Synthetic peptide
  Seed: SIGKVCRTLLAKSVF
SIVKVRRSLLRKSVF

SEQ ID NO: 273674 - protein, 15 aa, Artificial Sequence
  Description of Artificial Sequence: Synthetic peptide
  Seed: SIGKVCRTLLAKSVF
SIVKVRRSLLSKSVF

SEQ ID NO: 273675 - protein, 15 aa, Artificial Sequence
  Description of Artificial Sequence: Synthetic peptide
  Seed: SIGKVCRTLLAKSVF
SIVKVRRTLLAKSVF

SEQ ID NO: 273676 - protein, 15 aa, Artificial Sequence
  Description of Artificial Sequence: Synthetic peptide
  Seed: SIGKVCRTLLAKSVF
SIVKVRRTLLGKSVF

SEQ ID NO: 273677 - protein, 15 aa, Artificial Sequence
  Description of Artificial Sequence: Synthetic peptide
  Seed: SIGKVCRTLLAKSVF
SIVKVRRTLLQKSVF

SEQ ID NO: 273678 - protein, 15 aa, Artificial Sequence
  Description of Artificial Sequence: Synthetic peptide
  Seed: SIGKVCRTLLAKSVF
SIVKVRRTLLRKSVF

SEQ ID NO: 273679 - protein, 15 aa, Artificial Sequence
  Description of Artificial Sequence: Synthetic peptide
  Seed: SIGKVCRTLLAKSVF
SIVKVRRTLLSKSVF

SEQ ID NO: 273680 - protein, 15 aa, Artificial Sequence
  Description of Artificial Sequence: Synthetic peptide
  Seed: SIGKVCRTLLAKSVF
SIVKVRRTLLYKSVF

SEQ ID NO: 273681 - protein, 15 aa, Artificial Sequence
  Description of Artificial Sequence: Synthetic peptide
  Seed: SIGKVCRTLLAKSVF
SIVKVRRVLLQKSVF

SEQ ID NO: 273682 - protein, 15 aa, Artificial Sequence
  Description of Artificial Sequence: Synthetic peptide
  Seed: SIGKVCRTLLAKSVF
SIVKVRRVLLRKSVF

SEQ ID NO: 273683 - protein, 15 aa, Artificial Sequence
  Description of Artificial Sequence: Synthetic peptide
  Seed: SIGKVCRTLLAKSVF
SIVKVRRVLLSKSVF

SEQ ID NO: 273684 - protein, 15 aa, Artificial Sequence
  Description of Artificial Sequence: Synthetic peptide
  Seed: SIGKVCRTLLAKSVF
SIVKVSRHLLAKSVF

SEQ ID NO: 273685 - protein, 15 aa, Artificial Sequence
  Description of Artificial Sequence: Synthetic peptide
  Seed: SIGKVCRTLLAKSVF
SIVKVSRHLLGKSVF

SEQ ID NO: 273686 - protein, 15 aa, Artificial Sequence
  Description of Artificial Sequence: Synthetic peptide
  Seed: SIGKVCRTLLAKSVF
SIVKVSRHLLQKSVF

SEQ ID NO: 273687 - protein, 15 aa, Artificial Sequence
  Description of Artificial Sequence: Synthetic peptide
  Seed: SIGKVCRTLLAKSVF
SIVKVSRHLLSKSVF

SEQ ID NO: 273688 - protein, 15 aa, Artificial Sequence
  Description of Artificial Sequence: Synthetic peptide
  Seed: SIGKVCRTLLAKSVF
SIVKVSRKLLAKSVF

SEQ ID NO: 273689 - protein, 15 aa, Artificial Sequence
  Description of Artificial Sequence: Synthetic peptide
  Seed: SIGKVCRTLLAKSVF
SIVKVSRKLLCKSVF

SEQ ID NO: 273690 - protein, 15 aa, Artificial Sequence
  Description of Artificial Sequence: Synthetic peptide
  Seed: SIGKVCRTLLAKSVF
SIVKVSRKLLDKSVF

SEQ ID NO: 273691 - protein, 15 aa, Artificial Sequence
  Description of Artificial Sequence: Synthetic peptide
  Seed: SIGKVCRTLLAKSVF
SIVKVSRKLLEKSVF

SEQ ID NO: 273692 - protein, 15 aa, Artificial Sequence
  Description of Artificial Sequence: Synthetic peptide
  Seed: SIGKVCRTLLAKSVF
SIVKVSRKLLFKSVF

SEQ ID NO: 273693 - protein, 15 aa, Artificial Sequence
  Description of Artificial Sequence: Synthetic peptide
  Seed: SIGKVCRTLLAKSVF
SIVKVSRKLLGKSVF

SEQ ID NO: 273694 - protein, 15 aa, Artificial Sequence
  Description of Artificial Sequence: Synthetic peptide
  Seed: SIGKVCRTLLAKSVF
SIVKVSRKLLHKSVF

SEQ ID NO: 273695 - protein, 15 aa, Artificial Sequence
  Description of Artificial Sequence: Synthetic peptide
  Seed: SIGKVCRTLLAKSVF
SIVKVSRKLLIKSVF

SEQ ID NO: 273696 - protein, 15 aa, Artificial Sequence
  Description of Artificial Sequence: Synthetic peptide
  Seed: SIGKVCRTLLAKSVF
SIVKVSRKLLKKSVF

SEQ ID NO: 273697 - protein, 15 aa, Artificial Sequence
  Description of Artificial Sequence: Synthetic peptide
  Seed: SIGKVCRTLLAKSVF
SIVKVSRKLLLKSVF

SEQ ID NO: 273698 - protein, 15 aa, Artificial Sequence
  Description of Artificial Sequence: Synthetic peptide
  Seed: SIGKVCRTLLAKSVF
SIVKVSRKLLMKSVF

SEQ ID NO: 273699 - protein, 15 aa, Artificial Sequence
  Description of Artificial Sequence: Synthetic peptide
  Seed: SIGKVCRTLLAKSVF
SIVKVSRKLLNKSVF

SEQ ID NO: 273700 - protein, 15 aa, Artificial Sequence
  Description of Artificial Sequence: Synthetic peptide
  Seed: SIGKVCRTLLAKSVF
SIVKVSRKLLPKSVF

SEQ ID NO: 273701 - protein, 15 aa, Artificial Sequence
  Description of Artificial Sequence: Synthetic peptide
  Seed: SIGKVCRTLLAKSVF
SIVKVSRKLLQKSVF

SEQ ID NO: 273702 - protein, 15 aa, Artificial Sequence
  Description of Artificial Sequence: Synthetic peptide
  Seed: SIGKVCRTLLAKSVF
SIVKVSRKLLRKSVF

SEQ ID NO: 273703 - protein, 15 aa, Artificial Sequence
  Description of Artificial Sequence: Synthetic peptide
  Seed: SIGKVCRTLLAKSVF
SIVKVSRKLLSKSVF

SEQ ID NO: 273704 - protein, 15 aa, Artificial Sequence
  Description of Artificial Sequence: Synthetic peptide
  Seed: SIGKVCRTLLAKSVF
SIVKVSRKLLTKSVF

SEQ ID NO: 273705 - protein, 15 aa, Artificial Sequence
  Description of Artificial Sequence: Synthetic peptide
  Seed: SIGKVCRTLLAKSVF
SIVKVSRKLLVKSVF

SEQ ID NO: 273706 - protein, 15 aa, Artificial Sequence
  Description of Artificial Sequence: Synthetic peptide
  Seed: SIGKVCRTLLAKSVF
SIVKVSRKLLYKSVF

SEQ ID NO: 273707 - protein, 15 aa, Artificial Sequence
  Description of Artificial Sequence: Synthetic peptide
  Seed: SIGKVCRTLLAKSVF
SIVKVSRNLLAKSVF

SEQ ID NO: 273708 - protein, 15 aa, Artificial Sequence
  Description of Artificial Sequence: Synthetic peptide
  Seed: SIGKVCRTLLAKSVF
SIVKVSRNLLGKSVF

SEQ ID NO: 273709 - protein, 15 aa, Artificial Sequence
  Description of Artificial Sequence: Synthetic peptide
  Seed: SIGKVCRTLLAKSVF
SIVKVSRNLLQKSVF

SEQ ID NO: 273710 - protein, 15 aa, Artificial Sequence
  Description of Artificial Sequence: Synthetic peptide
  Seed: SIGKVCRTLLAKSVF
SIVKVSRNLLSKSVF

SEQ ID NO: 273711 - protein, 15 aa, Artificial Sequence
  Description of Artificial Sequence: Synthetic peptide
  Seed: SIGKVCRTLLAKSVF
SIVKVSRRLLAKSVF

SEQ ID NO: 273712 - protein, 15 aa, Artificial Sequence
  Description of Artificial Sequence: Synthetic peptide
  Seed: SIGKVCRTLLAKSVF
SIVKVSRRLLCKSVF

SEQ ID NO: 273713 - protein, 15 aa, Artificial Sequence
  Description of Artificial Sequence: Synthetic peptide
  Seed: SIGKVCRTLLAKSVF
SIVKVSRRLLDKSVF

SEQ ID NO: 273714 - protein, 15 aa, Artificial Sequence
  Description of Artificial Sequence: Synthetic peptide
  Seed: SIGKVCRTLLAKSVF
SIVKVSRRLLEKSVF

SEQ ID NO: 273715 - protein, 15 aa, Artificial Sequence
  Description of Artificial Sequence: Synthetic peptide
  Seed: SIGKVCRTLLAKSVF
SIVKVSRRLLGKSVF

SEQ ID NO: 273716 - protein, 15 aa, Artificial Sequence
  Description of Artificial Sequence: Synthetic peptide
  Seed: SIGKVCRTLLAKSVF
SIVKVSRRLLHKSVF

SEQ ID NO: 273717 - protein, 15 aa, Artificial Sequence
  Description of Artificial Sequence: Synthetic peptide
  Seed: SIGKVCRTLLAKSVF
SIVKVSRRLLIKSVF

SEQ ID NO: 273718 - protein, 15 aa, Artificial Sequence
  Description of Artificial Sequence: Synthetic peptide
  Seed: SIGKVCRTLLAKSVF
SIVKVSRRLLKKSVF

SEQ ID NO: 273719 - protein, 15 aa, Artificial Sequence
  Description of Artificial Sequence: Synthetic peptide
  Seed: SIGKVCRTLLAKSVF
SIVKVSRRLLLKSVF

SEQ ID NO: 273720 - protein, 15 aa, Artificial Sequence
  Description of Artificial Sequence: Synthetic peptide
  Seed: SIGKVCRTLLAKSVF
SIVKVSRRLLMKSVF

SEQ ID NO: 273721 - protein, 15 aa, Artificial Sequence
  Description of Artificial Sequence: Synthetic peptide
  Seed: SIGKVCRTLLAKSVF
SIVKVSRRLLNKSVF

SEQ ID NO: 273722 - protein, 15 aa, Artificial Sequence
  Description of Artificial Sequence: Synthetic peptide
  Seed: SIGKVCRTLLAKSVF
SIVKVSRRLLPKSVF

SEQ ID NO: 273723 - protein, 15 aa, Artificial Sequence
  Description of Artificial Sequence: Synthetic peptide
  Seed: SIGKVCRTLLAKSVF
SIVKVSRRLLQKSVF

SEQ ID NO: 273724 - protein, 15 aa, Artificial Sequence
  Description of Artificial Sequence: Synthetic peptide
  Seed: SIGKVCRTLLAKSVF
SIVKVSRRLLRKSVF

SEQ ID NO: 273725 - protein, 15 aa, Artificial Sequence
  Description of Artificial Sequence: Synthetic peptide
  Seed: SIGKVCRTLLAKSVF
SIVKVSRRLLSKSVF

SEQ ID NO: 273726 - protein, 15 aa, Artificial Sequence
  Description of Artificial Sequence: Synthetic peptide
  Seed: SIGKVCRTLLAKSVF
SIVKVSRRLLTKSVF

SEQ ID NO: 273727 - protein, 15 aa, Artificial Sequence
  Description of Artificial Sequence: Synthetic peptide
  Seed: SIGKVCRTLLAKSVF
SIVKVSRRLLVKSVF

SEQ ID NO: 273728 - protein, 15 aa, Artificial Sequence
  Description of Artificial Sequence: Synthetic peptide
  Seed: SIGKVCRTLLAKSVF
SIVKVSRRLLYKSVF

SEQ ID NO: 273729 - protein, 15 aa, Artificial Sequence
  Description of Artificial Sequence: Synthetic peptide
  Seed: SIGKVCRTLLAKSVF
SIVKVSRSLLAKSVF

SEQ ID NO: 273730 - protein, 15 aa, Artificial Sequence
  Description of Artificial Sequence: Synthetic peptide
  Seed: SIGKVCRTLLAKSVF
SIVKVSRSLLGKSVF

SEQ ID NO: 273731 - protein, 15 aa, Artificial Sequence
  Description of Artificial Sequence: Synthetic peptide
  Seed: SIGKVCRTLLAKSVF
SIVKVSRSLLQKSVF

SEQ ID NO: 273732 - protein, 15 aa, Artificial Sequence
  Description of Artificial Sequence: Synthetic peptide
  Seed: SIGKVCRTLLAKSVF
SIVKVSRSLLSKSVF

SEQ ID NO: 273733 - protein, 15 aa, Artificial Sequence
  Description of Artificial Sequence: Synthetic peptide
  Seed: SIGKVCRTLLAKSVF
SIVKVSRTLLAKSVF

SEQ ID NO: 273734 - protein, 15 aa, Artificial Sequence
  Description of Artificial Sequence: Synthetic peptide
  Seed: SIGKVCRTLLAKSVF
SIVKVSRTLLGKSVF

SEQ ID NO: 273735 - protein, 15 aa, Artificial Sequence
  Description of Artificial Sequence: Synthetic peptide
  Seed: SIGKVCRTLLAKSVF
SIVKVSRTLLQKSVF

SEQ ID NO: 273736 - protein, 15 aa, Artificial Sequence
  Description of Artificial Sequence: Synthetic peptide
  Seed: SIGKVCRTLLAKSVF
SIVKVSRTLLSKSVF

SEQ ID NO: 273737 - protein, 15 aa, Artificial Sequence
  Description of Artificial Sequence: Synthetic peptide
  Seed: SIGKVCRTLLAKSVF
SIVKVTRALLGKSVF

SEQ ID NO: 273738 - protein, 15 aa, Artificial Sequence
  Description of Artificial Sequence: Synthetic peptide
  Seed: SIGKVCRTLLAKSVF
SIVKVTRALLQKSVF

SEQ ID NO: 273739 - protein, 15 aa, Artificial Sequence
  Description of Artificial Sequence: Synthetic peptide
  Seed: SIGKVCRTLLAKSVF
SIVKVTRHLLAKSVF

SEQ ID NO: 273740 - protein, 15 aa, Artificial Sequence
  Description of Artificial Sequence: Synthetic peptide
  Seed: SIGKVCRTLLAKSVF
SIVKVTRHLLGKSVF

SEQ ID NO: 273741 - protein, 15 aa, Artificial Sequence
  Description of Artificial Sequence: Synthetic peptide
  Seed: SIGKVCRTLLAKSVF
SIVKVTRHLLQKSVF

SEQ ID NO: 273742 - protein, 15 aa, Artificial Sequence
  Description of Artificial Sequence: Synthetic peptide
  Seed: SIGKVCRTLLAKSVF
SIVKVTRHLLSKSVF

SEQ ID NO: 273743 - protein, 15 aa, Artificial Sequence
  Description of Artificial Sequence: Synthetic peptide
  Seed: SIGKVCRTLLAKSVF
SIVKVTRKLLAKSVF

SEQ ID NO: 273744 - protein, 15 aa, Artificial Sequence
  Description of Artificial Sequence: Synthetic peptide
  Seed: SIGKVCRTLLAKSVF
SIVKVTRKLLCKSVF

SEQ ID NO: 273745 - protein, 15 aa, Artificial Sequence
  Description of Artificial Sequence: Synthetic peptide
  Seed: SIGKVCRTLLAKSVF
SIVKVTRKLLDKSVF

SEQ ID NO: 273746 - protein, 15 aa, Artificial Sequence
  Description of Artificial Sequence: Synthetic peptide
  Seed: SIGKVCRTLLAKSVF
SIVKVTRKLLEKSVF

SEQ ID NO: 273747 - protein, 15 aa, Artificial Sequence
  Description of Artificial Sequence: Synthetic peptide
  Seed: SIGKVCRTLLAKSVF
SIVKVTRKLLFKSVF

SEQ ID NO: 273748 - protein, 15 aa, Artificial Sequence
  Description of Artificial Sequence: Synthetic peptide
  Seed: SIGKVCRTLLAKSVF
SIVKVTRKLLGKSVF

SEQ ID NO: 273749 - protein, 15 aa, Artificial Sequence
  Description of Artificial Sequence: Synthetic peptide
  Seed: SIGKVCRTLLAKSVF
SIVKVTRKLLHKSVF

SEQ ID NO: 273750 - protein, 15 aa, Artificial Sequence
  Description of Artificial Sequence: Synthetic peptide
  Seed: SIGKVCRTLLAKSVF
SIVKVTRKLLIKSVF

SEQ ID NO: 273751 - protein, 15 aa, Artificial Sequence
  Description of Artificial Sequence: Synthetic peptide
  Seed: SIGKVCRTLLAKSVF
SIVKVTRKLLKKSVF

SEQ ID NO: 273752 - protein, 15 aa, Artificial Sequence
  Description of Artificial Sequence: Synthetic peptide
  Seed: SIGKVCRTLLAKSVF
SIVKVTRKLLLKSVF

SEQ ID NO: 273753 - protein, 15 aa, Artificial Sequence
  Description of Artificial Sequence: Synthetic peptide
  Seed: SIGKVCRTLLAKSVF
SIVKVTRKLLMKSVF

SEQ ID NO: 273754 - protein, 15 aa, Artificial Sequence
  Description of Artificial Sequence: Synthetic peptide
  Seed: SIGKVCRTLLAKSVF
SIVKVTRKLLNKSVF

SEQ ID NO: 273755 - protein, 15 aa, Artificial Sequence
  Description of Artificial Sequence: Synthetic peptide
  Seed: SIGKVCRTLLAKSVF
SIVKVTRKLLPKSVF

SEQ ID NO: 273756 - protein, 15 aa, Artificial Sequence
  Description of Artificial Sequence: Synthetic peptide
  Seed: SIGKVCRTLLAKSVF
SIVKVTRKLLQKSVF

SEQ ID NO: 273757 - protein, 15 aa, Artificial Sequence
  Description of Artificial Sequence: Synthetic peptide
  Seed: SIGKVCRTLLAKSVF
SIVKVTRKLLRKSVF

SEQ ID NO: 273758 - protein, 15 aa, Artificial Sequence
  Description of Artificial Sequence: Synthetic peptide
  Seed: SIGKVCRTLLAKSVF
SIVKVTRKLLSKSVF

SEQ ID NO: 273759 - protein, 15 aa, Artificial Sequence
  Description of Artificial Sequence: Synthetic peptide
  Seed: SIGKVCRTLLAKSVF
SIVKVTRKLLTKSVF

SEQ ID NO: 273760 - protein, 15 aa, Artificial Sequence
  Description of Artificial Sequence: Synthetic peptide
  Seed: SIGKVCRTLLAKSVF
SIVKVTRKLLVKSVF

SEQ ID NO: 273761 - protein, 15 aa, Artificial Sequence
  Description of Artificial Sequence: Synthetic peptide
  Seed: SIGKVCRTLLAKSVF
SIVKVTRKLLYKSVF

SEQ ID NO: 273762 - protein, 15 aa, Artificial Sequence
  Description of Artificial Sequence: Synthetic peptide
  Seed: SIGKVCRTLLAKSVF
SIVKVTRNLLAKSVF

SEQ ID NO: 273763 - protein, 15 aa, Artificial Sequence
  Description of Artificial Sequence: Synthetic peptide
  Seed: SIGKVCRTLLAKSVF
SIVKVTRNLLGKSVF

SEQ ID NO: 273764 - protein, 15 aa, Artificial Sequence
  Description of Artificial Sequence: Synthetic peptide
  Seed: SIGKVCRTLLAKSVF
SIVKVTRNLLQKSVF

SEQ ID NO: 273765 - protein, 15 aa, Artificial Sequence
  Description of Artificial Sequence: Synthetic peptide
  Seed: SIGKVCRTLLAKSVF
SIVKVTRNLLSKSVF

SEQ ID NO: 273766 - protein, 15 aa, Artificial Sequence
  Description of Artificial Sequence: Synthetic peptide
  Seed: SIGKVCRTLLAKSVF
SIVKVTRRLLAKSVF

SEQ ID NO: 273767 - protein, 15 aa, Artificial Sequence
  Description of Artificial Sequence: Synthetic peptide
  Seed: SIGKVCRTLLAKSVF
SIVKVTRRLLCKSVF

SEQ ID NO: 273768 - protein, 15 aa, Artificial Sequence
  Description of Artificial Sequence: Synthetic peptide
  Seed: SIGKVCRTLLAKSVF
SIVKVTRRLLDKSVF

SEQ ID NO: 273769 - protein, 15 aa, Artificial Sequence
  Description of Artificial Sequence: Synthetic peptide
  Seed: SIGKVCRTLLAKSVF
SIVKVTRRLLEKSVF

SEQ ID NO: 273770 - protein, 15 aa, Artificial Sequence
  Description of Artificial Sequence: Synthetic peptide
  Seed: SIGKVCRTLLAKSVF
SIVKVTRRLLGKSVF

SEQ ID NO: 273771 - protein, 15 aa, Artificial Sequence
  Description of Artificial Sequence: Synthetic peptide
  Seed: SIGKVCRTLLAKSVF
SIVKVTRRLLHKSVF

SEQ ID NO: 273772 - protein, 15 aa, Artificial Sequence
  Description of Artificial Sequence: Synthetic peptide
  Seed: SIGKVCRTLLAKSVF
SIVKVTRRLLIKSVF

SEQ ID NO: 273773 - protein, 15 aa, Artificial Sequence
  Description of Artificial Sequence: Synthetic peptide
  Seed: SIGKVCRTLLAKSVF
SIVKVTRRLLKKSVF

SEQ ID NO: 273774 - protein, 15 aa, Artificial Sequence
  Description of Artificial Sequence: Synthetic peptide
  Seed: SIGKVCRTLLAKSVF
SIVKVTRRLLLKSVF

SEQ ID NO: 273775 - protein, 15 aa, Artificial Sequence
  Description of Artificial Sequence: Synthetic peptide
  Seed: SIGKVCRTLLAKSVF
SIVKVTRRLLMKSVF

SEQ ID NO: 273776 - protein, 15 aa, Artificial Sequence
  Description of Artificial Sequence: Synthetic peptide
  Seed: SIGKVCRTLLAKSVF
SIVKVTRRLLNKSVF

SEQ ID NO: 273777 - protein, 15 aa, Artificial Sequence
  Description of Artificial Sequence: Synthetic peptide
  Seed: SIGKVCRTLLAKSVF
SIVKVTRRLLPKSVF

SEQ ID NO: 273778 - protein, 15 aa, Artificial Sequence
  Description of Artificial Sequence: Synthetic peptide
  Seed: SIGKVCRTLLAKSVF
SIVKVTRRLLQKSVF

SEQ ID NO: 273779 - protein, 15 aa, Artificial Sequence
  Description of Artificial Sequence: Synthetic peptide
  Seed: SIGKVCRTLLAKSVF
SIVKVTRRLLRKSVF

SEQ ID NO: 273780 - protein, 15 aa, Artificial Sequence
  Description of Artificial Sequence: Synthetic peptide
  Seed: SIGKVCRTLLAKSVF
SIVKVTRRLLSKSVF

SEQ ID NO: 273781 - protein, 15 aa, Artificial Sequence
  Description of Artificial Sequence: Synthetic peptide
  Seed: SIGKVCRTLLAKSVF
SIVKVTRRLLTKSVF

SEQ ID NO: 273782 - protein, 15 aa, Artificial Sequence
  Description of Artificial Sequence: Synthetic peptide
  Seed: SIGKVCRTLLAKSVF
SIVKVTRRLLVKSVF

SEQ ID NO: 273783 - protein, 15 aa, Artificial Sequence
  Description of Artificial Sequence: Synthetic peptide
  Seed: SIGKVCRTLLAKSVF
SIVKVTRRLLYKSVF

SEQ ID NO: 273784 - protein, 15 aa, Artificial Sequence
  Description of Artificial Sequence: Synthetic peptide
  Seed: SIGKVCRTLLAKSVF
SIVKVTRSLLAKSVF

SEQ ID NO: 273785 - protein, 15 aa, Artificial Sequence
  Description of Artificial Sequence: Synthetic peptide
  Seed: SIGKVCRTLLAKSVF
SIVKVTRSLLGKSVF

SEQ ID NO: 273786 - protein, 15 aa, Artificial Sequence
  Description of Artificial Sequence: Synthetic peptide
  Seed: SIGKVCRTLLAKSVF
SIVKVTRSLLQKSVF

SEQ ID NO: 273787 - protein, 15 aa, Artificial Sequence
  Description of Artificial Sequence: Synthetic peptide
  Seed: SIGKVCRTLLAKSVF
SIVKVTRSLLSKSVF

SEQ ID NO: 273788 - protein, 15 aa, Artificial Sequence
  Description of Artificial Sequence: Synthetic peptide
  Seed: SIGKVCRTLLAKSVF
SIVKVTRTLLAKSVF

SEQ ID NO: 273789 - protein, 15 aa, Artificial Sequence
  Description of Artificial Sequence: Synthetic peptide
  Seed: SIGKVCRTLLAKSVF
SIVKVTRTLLGKSVF

SEQ ID NO: 273790 - protein, 15 aa, Artificial Sequence
  Description of Artificial Sequence: Synthetic peptide
  Seed: SIGKVCRTLLAKSVF
SIVKVTRTLLQKSVF

SEQ ID NO: 273791 - protein, 15 aa, Artificial Sequence
  Description of Artificial Sequence: Synthetic peptide
  Seed: SIGKVCRTLLAKSVF
SIVKVTRTLLSKSVF

SEQ ID NO: 273792 - protein, 15 aa, Artificial Sequence
  Description of Artificial Sequence: Synthetic peptide
  Seed: SIGKVCRTLLAKSVF
SIVKVTRTLLYKSVF

SEQ ID NO: 273793 - protein, 15 aa, Artificial Sequence
  Description of Artificial Sequence: Synthetic peptide
  Seed: SIGKVCRTLLAKSVF
SIVKVVRALLAKSVF

SEQ ID NO: 273794 - protein, 15 aa, Artificial Sequence
  Description of Artificial Sequence: Synthetic peptide
  Seed: SIGKVCRTLLAKSVF
SIVKVVRALLGKSVF

SEQ ID NO: 273795 - protein, 15 aa, Artificial Sequence
  Description of Artificial Sequence: Synthetic peptide
  Seed: SIGKVCRTLLAKSVF
SIVKVVRALLHKSVF

SEQ ID NO: 273796 - protein, 15 aa, Artificial Sequence
  Description of Artificial Sequence: Synthetic peptide
  Seed: SIGKVCRTLLAKSVF
SIVKVVRALLQKSVF

SEQ ID NO: 273797 - protein, 15 aa, Artificial Sequence
  Description of Artificial Sequence: Synthetic peptide
  Seed: SIGKVCRTLLAKSVF
SIVKVVRALLSKSVF

SEQ ID NO: 273798 - protein, 15 aa, Artificial Sequence
  Description of Artificial Sequence: Synthetic peptide
  Seed: SIGKVCRTLLAKSVF
SIVKVVRGLLAKSVF

SEQ ID NO: 273799 - protein, 15 aa, Artificial Sequence
  Description of Artificial Sequence: Synthetic peptide
  Seed: SIGKVCRTLLAKSVF
SIVKVVRGLLGKSVF

SEQ ID NO: 273800 - protein, 15 aa, Artificial Sequence
  Description of Artificial Sequence: Synthetic peptide
  Seed: SIGKVCRTLLAKSVF
SIVKVVRGLLQKSVF

SEQ ID NO: 273801 - protein, 15 aa, Artificial Sequence
  Description of Artificial Sequence: Synthetic peptide
  Seed: SIGKVCRTLLAKSVF
SIVKVVRGLLSKSVF

SEQ ID NO: 273802 - protein, 15 aa, Artificial Sequence
  Description of Artificial Sequence: Synthetic peptide
  Seed: SIGKVCRTLLAKSVF
SIVKVVRHLLAKSVF

SEQ ID NO: 273803 - protein, 15 aa, Artificial Sequence
  Description of Artificial Sequence: Synthetic peptide
  Seed: SIGKVCRTLLAKSVF
SIVKVVRHLLGKSVF

SEQ ID NO: 273804 - protein, 15 aa, Artificial Sequence
  Description of Artificial Sequence: Synthetic peptide
  Seed: SIGKVCRTLLAKSVF
SIVKVVRHLLHKSVF

SEQ ID NO: 273805 - protein, 15 aa, Artificial Sequence
  Description of Artificial Sequence: Synthetic peptide
  Seed: SIGKVCRTLLAKSVF
SIVKVVRHLLIKSVF

SEQ ID NO: 273806 - protein, 15 aa, Artificial Sequence
  Description of Artificial Sequence: Synthetic peptide
  Seed: SIGKVCRTLLAKSVF
SIVKVVRHLLMKSVF

SEQ ID NO: 273807 - protein, 15 aa, Artificial Sequence
  Description of Artificial Sequence: Synthetic peptide
  Seed: SIGKVCRTLLAKSVF
SIVKVVRHLLNKSVF

SEQ ID NO: 273808 - protein, 15 aa, Artificial Sequence
  Description of Artificial Sequence: Synthetic peptide
  Seed: SIGKVCRTLLAKSVF
SIVKVVRHLLQKSVF

SEQ ID NO: 273809 - protein, 15 aa, Artificial Sequence
  Description of Artificial Sequence: Synthetic peptide
  Seed: SIGKVCRTLLAKSVF
SIVKVVRHLLRKSVF

SEQ ID NO: 273810 - protein, 15 aa, Artificial Sequence
  Description of Artificial Sequence: Synthetic peptide
  Seed: SIGKVCRTLLAKSVF
SIVKVVRHLLSKSVF

SEQ ID NO: 273811 - protein, 15 aa, Artificial Sequence
  Description of Artificial Sequence: Synthetic peptide
  Seed: SIGKVCRTLLAKSVF
SIVKVVRHLLTKSVF

SEQ ID NO: 273812 - protein, 15 aa, Artificial Sequence
  Description of Artificial Sequence: Synthetic peptide
  Seed: SIGKVCRTLLAKSVF
SIVKVVRHLLVKSVF

SEQ ID NO: 273813 - protein, 15 aa, Artificial Sequence
  Description of Artificial Sequence: Synthetic peptide
  Seed: SIGKVCRTLLAKSVF
SIVKVVRHLLYKSVF

SEQ ID NO: 273814 - protein, 15 aa, Artificial Sequence
  Description of Artificial Sequence: Synthetic peptide
  Seed: SIGKVCRTLLAKSVF
SIVKVVRKLLAKSVF

SEQ ID NO: 273815 - protein, 15 aa, Artificial Sequence
  Description of Artificial Sequence: Synthetic peptide
  Seed: SIGKVCRTLLAKSVF
SIVKVVRKLLCKSVF

SEQ ID NO: 273816 - protein, 15 aa, Artificial Sequence
  Description of Artificial Sequence: Synthetic peptide
  Seed: SIGKVCRTLLAKSVF
SIVKVVRKLLDKSVF

SEQ ID NO: 273817 - protein, 15 aa, Artificial Sequence
  Description of Artificial Sequence: Synthetic peptide
  Seed: SIGKVCRTLLAKSVF
SIVKVVRKLLEKSVF

SEQ ID NO: 273818 - protein, 15 aa, Artificial Sequence
  Description of Artificial Sequence: Synthetic peptide
  Seed: SIGKVCRTLLAKSVF
SIVKVVRKLLFKSVF

SEQ ID NO: 273819 - protein, 15 aa, Artificial Sequence
  Description of Artificial Sequence: Synthetic peptide
  Seed: SIGKVCRTLLAKSVF
SIVKVVRKLLGKSVF

SEQ ID NO: 273820 - protein, 15 aa, Artificial Sequence
  Description of Artificial Sequence: Synthetic peptide
  Seed: SIGKVCRTLLAKSVF
SIVKVVRKLLHKSVF

SEQ ID NO: 273821 - protein, 15 aa, Artificial Sequence
  Description of Artificial Sequence: Synthetic peptide
  Seed: SIGKVCRTLLAKSVF
SIVKVVRKLLIKSVF

SEQ ID NO: 273822 - protein, 15 aa, Artificial Sequence
  Description of Artificial Sequence: Synthetic peptide
  Seed: SIGKVCRTLLAKSVF
SIVKVVRKLLKKSVF

SEQ ID NO: 273823 - protein, 15 aa, Artificial Sequence
  Description of Artificial Sequence: Synthetic peptide
  Seed: SIGKVCRTLLAKSVF
SIVKVVRKLLLKSVF

SEQ ID NO: 273824 - protein, 15 aa, Artificial Sequence
  Description of Artificial Sequence: Synthetic peptide
  Seed: SIGKVCRTLLAKSVF
SIVKVVRKLLMKSVF

SEQ ID NO: 273825 - protein, 15 aa, Artificial Sequence
  Description of Artificial Sequence: Synthetic peptide
  Seed: SIGKVCRTLLAKSVF
SIVKVVRKLLNKSVF

SEQ ID NO: 273826 - protein, 15 aa, Artificial Sequence
  Description of Artificial Sequence: Synthetic peptide
  Seed: SIGKVCRTLLAKSVF
SIVKVVRKLLPKSVF

SEQ ID NO: 273827 - protein, 15 aa, Artificial Sequence
  Description of Artificial Sequence: Synthetic peptide
  Seed: SIGKVCRTLLAKSVF
SIVKVVRKLLQKSVF

SEQ ID NO: 273828 - protein, 15 aa, Artificial Sequence
  Description of Artificial Sequence: Synthetic peptide
  Seed: SIGKVCRTLLAKSVF
SIVKVVRKLLRKSVF

SEQ ID NO: 273829 - protein, 15 aa, Artificial Sequence
  Description of Artificial Sequence: Synthetic peptide
  Seed: SIGKVCRTLLAKSVF
SIVKVVRKLLSKSVF

SEQ ID NO: 273830 - protein, 15 aa, Artificial Sequence
  Description of Artificial Sequence: Synthetic peptide
  Seed: SIGKVCRTLLAKSVF
SIVKVVRKLLTKSVF

SEQ ID NO: 273831 - protein, 15 aa, Artificial Sequence
  Description of Artificial Sequence: Synthetic peptide
  Seed: SIGKVCRTLLAKSVF
SIVKVVRKLLVKSVF

SEQ ID NO: 273832 - protein, 15 aa, Artificial Sequence
  Description of Artificial Sequence: Synthetic peptide
  Seed: SIGKVCRTLLAKSVF
SIVKVVRKLLYKSVF

SEQ ID NO: 273833 - protein, 15 aa, Artificial Sequence
  Description of Artificial Sequence: Synthetic peptide
  Seed: SIGKVCRTLLAKSVF
SIVKVVRNLLAKSVF

SEQ ID NO: 273834 - protein, 15 aa, Artificial Sequence
  Description of Artificial Sequence: Synthetic peptide
  Seed: SIGKVCRTLLAKSVF
SIVKVVRNLLDKSVF

SEQ ID NO: 273835 - protein, 15 aa, Artificial Sequence
  Description of Artificial Sequence: Synthetic peptide
  Seed: SIGKVCRTLLAKSVF
SIVKVVRNLLGKSVF

SEQ ID NO: 273836 - protein, 15 aa, Artificial Sequence
  Description of Artificial Sequence: Synthetic peptide
  Seed: SIGKVCRTLLAKSVF
SIVKVVRNLLHKSVF

SEQ ID NO: 273837 - protein, 15 aa, Artificial Sequence
  Description of Artificial Sequence: Synthetic peptide
  Seed: SIGKVCRTLLAKSVF
SIVKVVRNLLQKSVF

SEQ ID NO: 273838 - protein, 15 aa, Artificial Sequence
  Description of Artificial Sequence: Synthetic peptide
  Seed: SIGKVCRTLLAKSVF
SIVKVVRNLLSKSVF

SEQ ID NO: 273839 - protein, 15 aa, Artificial Sequence
  Description of Artificial Sequence: Synthetic peptide
  Seed: SIGKVCRTLLAKSVF
SIVKVVRNLLTKSVF

SEQ ID NO: 273840 - protein, 15 aa, Artificial Sequence
  Description of Artificial Sequence: Synthetic peptide
  Seed: SIGKVCRTLLAKSVF
SIVKVVRPLLAKSVF

SEQ ID NO: 273841 - protein, 15 aa, Artificial Sequence
  Description of Artificial Sequence: Synthetic peptide
  Seed: SIGKVCRTLLAKSVF
SIVKVVRPLLGKSVF

SEQ ID NO: 273842 - protein, 15 aa, Artificial Sequence
  Description of Artificial Sequence: Synthetic peptide
  Seed: SIGKVCRTLLAKSVF
SIVKVVRPLLQKSVF

SEQ ID NO: 273843 - protein, 15 aa, Artificial Sequence
  Description of Artificial Sequence: Synthetic peptide
  Seed: SIGKVCRTLLAKSVF
SIVKVVRPLLSKSVF

SEQ ID NO: 273844 - protein, 15 aa, Artificial Sequence
  Description of Artificial Sequence: Synthetic peptide
  Seed: SIGKVCRTLLAKSVF
SIVKVVRQLLAKSVF

SEQ ID NO: 273845 - protein, 15 aa, Artificial Sequence
  Description of Artificial Sequence: Synthetic peptide
  Seed: SIGKVCRTLLAKSVF
SIVKVVRQLLHKSVF

SEQ ID NO: 273846 - protein, 15 aa, Artificial Sequence
  Description of Artificial Sequence: Synthetic peptide
  Seed: SIGKVCRTLLAKSVF
SIVKVVRQLLSKSVF

SEQ ID NO: 273847 - protein, 15 aa, Artificial Sequence
  Description of Artificial Sequence: Synthetic peptide
  Seed: SIGKVCRTLLAKSVF
SIVKVVRRLLAKSVF

SEQ ID NO: 273848 - protein, 15 aa, Artificial Sequence
  Description of Artificial Sequence: Synthetic peptide
  Seed: SIGKVCRTLLAKSVF
SIVKVVRRLLCKSVF

SEQ ID NO: 273849 - protein, 15 aa, Artificial Sequence
  Description of Artificial Sequence: Synthetic peptide
  Seed: SIGKVCRTLLAKSVF
SIVKVVRRLLDKSVF

SEQ ID NO: 273850 - protein, 15 aa, Artificial Sequence
  Description of Artificial Sequence: Synthetic peptide
  Seed: SIGKVCRTLLAKSVF
SIVKVVRRLLEKSVF

SEQ ID NO: 273851 - protein, 15 aa, Artificial Sequence
  Description of Artificial Sequence: Synthetic peptide
  Seed: SIGKVCRTLLAKSVF
SIVKVVRRLLFKSVF

SEQ ID NO: 273852 - protein, 15 aa, Artificial Sequence
  Description of Artificial Sequence: Synthetic peptide
  Seed: SIGKVCRTLLAKSVF
SIVKVVRRLLGKSVF

SEQ ID NO: 273853 - protein, 15 aa, Artificial Sequence
  Description of Artificial Sequence: Synthetic peptide
  Seed: SIGKVCRTLLAKSVF
SIVKVVRRLLHKSVF

SEQ ID NO: 273854 - protein, 15 aa, Artificial Sequence
  Description of Artificial Sequence: Synthetic peptide
  Seed: SIGKVCRTLLAKSVF
SIVKVVRRLLIKSVF

SEQ ID NO: 273855 - protein, 15 aa, Artificial Sequence
  Description of Artificial Sequence: Synthetic peptide
  Seed: SIGKVCRTLLAKSVF
SIVKVVRRLLKKSVF

SEQ ID NO: 273856 - protein, 15 aa, Artificial Sequence
  Description of Artificial Sequence: Synthetic peptide
  Seed: SIGKVCRTLLAKSVF
SIVKVVRRLLLKSVF

SEQ ID NO: 273857 - protein, 15 aa, Artificial Sequence
  Description of Artificial Sequence: Synthetic peptide
  Seed: SIGKVCRTLLAKSVF
SIVKVVRRLLMKSVF

SEQ ID NO: 273858 - protein, 15 aa, Artificial Sequence
  Description of Artificial Sequence: Synthetic peptide
  Seed: SIGKVCRTLLAKSVF
SIVKVVRRLLNKSVF

SEQ ID NO: 273859 - protein, 15 aa, Artificial Sequence
  Description of Artificial Sequence: Synthetic peptide
  Seed: SIGKVCRTLLAKSVF
SIVKVVRRLLPKSVF

SEQ ID NO: 273860 - protein, 15 aa, Artificial Sequence
  Description of Artificial Sequence: Synthetic peptide
  Seed: SIGKVCRTLLAKSVF
SIVKVVRRLLQKSVF

SEQ ID NO: 273861 - protein, 15 aa, Artificial Sequence
  Description of Artificial Sequence: Synthetic peptide
  Seed: SIGKVCRTLLAKSVF
SIVKVVRRLLRKSVF

SEQ ID NO: 273862 - protein, 15 aa, Artificial Sequence
  Description of Artificial Sequence: Synthetic peptide
  Seed: SIGKVCRTLLAKSVF
SIVKVVRRLLSKSVF

SEQ ID NO: 273863 - protein, 15 aa, Artificial Sequence
  Description of Artificial Sequence: Synthetic peptide
  Seed: SIGKVCRTLLAKSVF
SIVKVVRRLLTKSVF

SEQ ID NO: 273864 - protein, 15 aa, Artificial Sequence
  Description of Artificial Sequence: Synthetic peptide
  Seed: SIGKVCRTLLAKSVF
SIVKVVRRLLVKSVF

SEQ ID NO: 273865 - protein, 15 aa, Artificial Sequence
  Description of Artificial Sequence: Synthetic peptide
  Seed: SIGKVCRTLLAKSVF
SIVKVVRRLLYKSVF

SEQ ID NO: 273866 - protein, 15 aa, Artificial Sequence
  Description of Artificial Sequence: Synthetic peptide
  Seed: SIGKVCRTLLAKSVF
SIVKVVRSLLAKSVF

SEQ ID NO: 273867 - protein, 15 aa, Artificial Sequence
  Description of Artificial Sequence: Synthetic peptide
  Seed: SIGKVCRTLLAKSVF
SIVKVVRSLLGKSVF

SEQ ID NO: 273868 - protein, 15 aa, Artificial Sequence
  Description of Artificial Sequence: Synthetic peptide
  Seed: SIGKVCRTLLAKSVF
SIVKVVRSLLHKSVF

SEQ ID NO: 273869 - protein, 15 aa, Artificial Sequence
  Description of Artificial Sequence: Synthetic peptide
  Seed: SIGKVCRTLLAKSVF
SIVKVVRSLLNKSVF

SEQ ID NO: 273870 - protein, 15 aa, Artificial Sequence
  Description of Artificial Sequence: Synthetic peptide
  Seed: SIGKVCRTLLAKSVF
SIVKVVRSLLQKSVF

SEQ ID NO: 273871 - protein, 15 aa, Artificial Sequence
  Description of Artificial Sequence: Synthetic peptide
  Seed: SIGKVCRTLLAKSVF
SIVKVVRSLLSKSVF

SEQ ID NO: 273872 - protein, 15 aa, Artificial Sequence
  Description of Artificial Sequence: Synthetic peptide
  Seed: SIGKVCRTLLAKSVF
SIVKVVRSLLTKSVF

SEQ ID NO: 273873 - protein, 15 aa, Artificial Sequence
  Description of Artificial Sequence: Synthetic peptide
  Seed: SIGKVCRTLLAKSVF
SIVKVVRSLLYKSVF

SEQ ID NO: 273874 - protein, 15 aa, Artificial Sequence
  Description of Artificial Sequence: Synthetic peptide
  Seed: SIGKVCRTLLAKSVF
SIVKVVRTLLAKSVF

SEQ ID NO: 273875 - protein, 15 aa, Artificial Sequence
  Description of Artificial Sequence: Synthetic peptide
  Seed: SIGKVCRTLLAKSVF
SIVKVVRTLLGKSVF

SEQ ID NO: 273876 - protein, 15 aa, Artificial Sequence
  Description of Artificial Sequence: Synthetic peptide
  Seed: SIGKVCRTLLAKSVF
SIVKVVRTLLHKSVF

SEQ ID NO: 273877 - protein, 15 aa, Artificial Sequence
  Description of Artificial Sequence: Synthetic peptide
  Seed: SIGKVCRTLLAKSVF
SIVKVVRTLLNKSVF

SEQ ID NO: 273878 - protein, 15 aa, Artificial Sequence
  Description of Artificial Sequence: Synthetic peptide
  Seed: SIGKVCRTLLAKSVF
SIVKVVRTLLQKSVF

SEQ ID NO: 273879 - protein, 15 aa, Artificial Sequence
  Description of Artificial Sequence: Synthetic peptide
  Seed: SIGKVCRTLLAKSVF
SIVKVVRTLLRKSVF

SEQ ID NO: 273880 - protein, 15 aa, Artificial Sequence
  Description of Artificial Sequence: Synthetic peptide
  Seed: SIGKVCRTLLAKSVF
SIVKVVRTLLSKSVF

SEQ ID NO: 273881 - protein, 15 aa, Artificial Sequence
  Description of Artificial Sequence: Synthetic peptide
  Seed: SIGKVCRTLLAKSVF
SIVKVVRTLLTKSVF

SEQ ID NO: 273882 - protein, 15 aa, Artificial Sequence
  Description of Artificial Sequence: Synthetic peptide
  Seed: SIGKVCRTLLAKSVF
SIVKVWRALLAKSVF

SEQ ID NO: 273883 - protein, 15 aa, Artificial Sequence
  Description of Artificial Sequence: Synthetic peptide
  Seed: SIGKVCRTLLAKSVF
SIVKVWRALLGKSVF

SEQ ID NO: 273884 - protein, 15 aa, Artificial Sequence
  Description of Artificial Sequence: Synthetic peptide
  Seed: SIGKVCRTLLAKSVF
SIVKVWRALLHKSVF

SEQ ID NO: 273885 - protein, 15 aa, Artificial Sequence
  Description of Artificial Sequence: Synthetic peptide
  Seed: SIGKVCRTLLAKSVF
SIVKVWRALLKKSVF

SEQ ID NO: 273886 - protein, 15 aa, Artificial Sequence
  Description of Artificial Sequence: Synthetic peptide
  Seed: SIGKVCRTLLAKSVF
SIVKVWRALLQKSVF

SEQ ID NO: 273887 - protein, 15 aa, Artificial Sequence
  Description of Artificial Sequence: Synthetic peptide
  Seed: SIGKVCRTLLAKSVF
SIVKVWRALLRKSVF

SEQ ID NO: 273888 - protein, 15 aa, Artificial Sequence
  Description of Artificial Sequence: Synthetic peptide
  Seed: SIGKVCRTLLAKSVF
SIVKVWRALLSKSVF

SEQ ID NO: 273889 - protein, 15 aa, Artificial Sequence
  Description of Artificial Sequence: Synthetic peptide
  Seed: SIGKVCRTLLAKSVF
SIVKVWRGLLAKSVF

SEQ ID NO: 273890 - protein, 15 aa, Artificial Sequence
  Description of Artificial Sequence: Synthetic peptide
  Seed: SIGKVCRTLLAKSVF
SIVKVWRGLLRKSVF

SEQ ID NO: 273891 - protein, 15 aa, Artificial Sequence
  Description of Artificial Sequence: Synthetic peptide
  Seed: SIGKVCRTLLAKSVF
SIVKVWRGLLSKSVF

SEQ ID NO: 273892 - protein, 15 aa, Artificial Sequence
  Description of Artificial Sequence: Synthetic peptide
  Seed: SIGKVCRTLLAKSVF
SIVKVWRHLLAKSVF

SEQ ID NO: 273893 - protein, 15 aa, Artificial Sequence
  Description of Artificial Sequence: Synthetic peptide
  Seed: SIGKVCRTLLAKSVF
SIVKVWRHLLGKSVF

SEQ ID NO: 273894 - protein, 15 aa, Artificial Sequence
  Description of Artificial Sequence: Synthetic peptide
  Seed: SIGKVCRTLLAKSVF
SIVKVWRHLLHKSVF

SEQ ID NO: 273895 - protein, 15 aa, Artificial Sequence
  Description of Artificial Sequence: Synthetic peptide
  Seed: SIGKVCRTLLAKSVF
SIVKVWRHLLMKSVF

SEQ ID NO: 273896 - protein, 15 aa, Artificial Sequence
  Description of Artificial Sequence: Synthetic peptide
  Seed: SIGKVCRTLLAKSVF
SIVKVWRHLLNKSVF

SEQ ID NO: 273897 - protein, 15 aa, Artificial Sequence
  Description of Artificial Sequence: Synthetic peptide
  Seed: SIGKVCRTLLAKSVF
SIVKVWRHLLQKSVF

SEQ ID NO: 273898 - protein, 15 aa, Artificial Sequence
  Description of Artificial Sequence: Synthetic peptide
  Seed: SIGKVCRTLLAKSVF
SIVKVWRHLLRKSVF

SEQ ID NO: 273899 - protein, 15 aa, Artificial Sequence
  Description of Artificial Sequence: Synthetic peptide
  Seed: SIGKVCRTLLAKSVF
SIVKVWRHLLSKSVF

SEQ ID NO: 273900 - protein, 15 aa, Artificial Sequence
  Description of Artificial Sequence: Synthetic peptide
  Seed: SIGKVCRTLLAKSVF
SIVKVWRHLLTKSVF

SEQ ID NO: 273901 - protein, 15 aa, Artificial Sequence
  Description of Artificial Sequence: Synthetic peptide
  Seed: SIGKVCRTLLAKSVF
SIVKVWRHLLVKSVF

SEQ ID NO: 273902 - protein, 15 aa, Artificial Sequence
  Description of Artificial Sequence: Synthetic peptide
  Seed: SIGKVCRTLLAKSVF
SIVKVWRHLLYKSVF

SEQ ID NO: 273903 - protein, 15 aa, Artificial Sequence
  Description of Artificial Sequence: Synthetic peptide
  Seed: SIGKVCRTLLAKSVF
SIVKVWRKLLAKSVF

SEQ ID NO: 273904 - protein, 15 aa, Artificial Sequence
  Description of Artificial Sequence: Synthetic peptide
  Seed: SIGKVCRTLLAKSVF
SIVKVWRKLLCKSVF

SEQ ID NO: 273905 - protein, 15 aa, Artificial Sequence
  Description of Artificial Sequence: Synthetic peptide
  Seed: SIGKVCRTLLAKSVF
SIVKVWRKLLDKSVF

SEQ ID NO: 273906 - protein, 15 aa, Artificial Sequence
  Description of Artificial Sequence: Synthetic peptide
  Seed: SIGKVCRTLLAKSVF
SIVKVWRKLLEKSVF

SEQ ID NO: 273907 - protein, 15 aa, Artificial Sequence
  Description of Artificial Sequence: Synthetic peptide
  Seed: SIGKVCRTLLAKSVF
SIVKVWRKLLFKSVF

SEQ ID NO: 273908 - protein, 15 aa, Artificial Sequence
  Description of Artificial Sequence: Synthetic peptide
  Seed: SIGKVCRTLLAKSVF
SIVKVWRKLLGKSVF

SEQ ID NO: 273909 - protein, 15 aa, Artificial Sequence
  Description of Artificial Sequence: Synthetic peptide
  Seed: SIGKVCRTLLAKSVF
SIVKVWRKLLHKSVF

SEQ ID NO: 273910 - protein, 15 aa, Artificial Sequence
  Description of Artificial Sequence: Synthetic peptide
  Seed: SIGKVCRTLLAKSVF
SIVKVWRKLLIKSVF

SEQ ID NO: 273911 - protein, 15 aa, Artificial Sequence
  Description of Artificial Sequence: Synthetic peptide
  Seed: SIGKVCRTLLAKSVF
SIVKVWRKLLKKSVF

SEQ ID NO: 273912 - protein, 15 aa, Artificial Sequence
  Description of Artificial Sequence: Synthetic peptide
  Seed: SIGKVCRTLLAKSVF
SIVKVWRKLLLKSVF

SEQ ID NO: 273913 - protein, 15 aa, Artificial Sequence
  Description of Artificial Sequence: Synthetic peptide
  Seed: SIGKVCRTLLAKSVF
SIVKVWRKLLMKSVF

SEQ ID NO: 273914 - protein, 15 aa, Artificial Sequence
  Description of Artificial Sequence: Synthetic peptide
  Seed: SIGKVCRTLLAKSVF
SIVKVWRKLLNKSVF

SEQ ID NO: 273915 - protein, 15 aa, Artificial Sequence
  Description of Artificial Sequence: Synthetic peptide
  Seed: SIGKVCRTLLAKSVF
SIVKVWRKLLPKSVF

SEQ ID NO: 273916 - protein, 15 aa, Artificial Sequence
  Description of Artificial Sequence: Synthetic peptide
  Seed: SIGKVCRTLLAKSVF
SIVKVWRKLLQKSVF

SEQ ID NO: 273917 - protein, 15 aa, Artificial Sequence
  Description of Artificial Sequence: Synthetic peptide
  Seed: SIGKVCRTLLAKSVF
SIVKVWRKLLRKSVF

SEQ ID NO: 273918 - protein, 15 aa, Artificial Sequence
  Description of Artificial Sequence: Synthetic peptide
  Seed: SIGKVCRTLLAKSVF
SIVKVWRKLLSKSVF

SEQ ID NO: 273919 - protein, 15 aa, Artificial Sequence
  Description of Artificial Sequence: Synthetic peptide
  Seed: SIGKVCRTLLAKSVF
SIVKVWRKLLTKSVF

SEQ ID NO: 273920 - protein, 15 aa, Artificial Sequence
  Description of Artificial Sequence: Synthetic peptide
  Seed: SIGKVCRTLLAKSVF
SIVKVWRKLLVKSVF

SEQ ID NO: 273921 - protein, 15 aa, Artificial Sequence
  Description of Artificial Sequence: Synthetic peptide
  Seed: SIGKVCRTLLAKSVF
SIVKVWRKLLWKSVF

SEQ ID NO: 273922 - protein, 15 aa, Artificial Sequence
  Description of Artificial Sequence: Synthetic peptide
  Seed: SIGKVCRTLLAKSVF
SIVKVWRKLLYKSVF

SEQ ID NO: 273923 - protein, 15 aa, Artificial Sequence
  Description of Artificial Sequence: Synthetic peptide
  Seed: SIGKVCRTLLAKSVF
SIVKVWRNLLAKSVF

SEQ ID NO: 273924 - protein, 15 aa, Artificial Sequence
  Description of Artificial Sequence: Synthetic peptide
  Seed: SIGKVCRTLLAKSVF
SIVKVWRNLLGKSVF

SEQ ID NO: 273925 - protein, 15 aa, Artificial Sequence
  Description of Artificial Sequence: Synthetic peptide
  Seed: SIGKVCRTLLAKSVF
SIVKVWRNLLHKSVF

SEQ ID NO: 273926 - protein, 15 aa, Artificial Sequence
  Description of Artificial Sequence: Synthetic peptide
  Seed: SIGKVCRTLLAKSVF
SIVKVWRNLLKKSVF

SEQ ID NO: 273927 - protein, 15 aa, Artificial Sequence
  Description of Artificial Sequence: Synthetic peptide
  Seed: SIGKVCRTLLAKSVF
SIVKVWRNLLRKSVF

SEQ ID NO: 273928 - protein, 15 aa, Artificial Sequence
  Description of Artificial Sequence: Synthetic peptide
  Seed: SIGKVCRTLLAKSVF
SIVKVWRNLLSKSVF

SEQ ID NO: 273929 - protein, 15 aa, Artificial Sequence
  Description of Artificial Sequence: Synthetic peptide
  Seed: SIGKVCRTLLAKSVF
SIVKVWRPLLAKSVF

SEQ ID NO: 273930 - protein, 15 aa, Artificial Sequence
  Description of Artificial Sequence: Synthetic peptide
  Seed: SIGKVCRTLLAKSVF
SIVKVWRPLLGKSVF

SEQ ID NO: 273931 - protein, 15 aa, Artificial Sequence
  Description of Artificial Sequence: Synthetic peptide
  Seed: SIGKVCRTLLAKSVF
SIVKVWRPLLQKSVF

SEQ ID NO: 273932 - protein, 15 aa, Artificial Sequence
  Description of Artificial Sequence: Synthetic peptide
  Seed: SIGKVCRTLLAKSVF
SIVKVWRPLLRKSVF

SEQ ID NO: 273933 - protein, 15 aa, Artificial Sequence
  Description of Artificial Sequence: Synthetic peptide
  Seed: SIGKVCRTLLAKSVF
SIVKVWRPLLSKSVF

SEQ ID NO: 273934 - protein, 15 aa, Artificial Sequence
  Description of Artificial Sequence: Synthetic peptide
  Seed: SIGKVCRTLLAKSVF
SIVKVWRQLLHKSVF

SEQ ID NO: 273935 - protein, 15 aa, Artificial Sequence
  Description of Artificial Sequence: Synthetic peptide
  Seed: SIGKVCRTLLAKSVF
SIVKVWRQLLRKSVF

SEQ ID NO: 273936 - protein, 15 aa, Artificial Sequence
  Description of Artificial Sequence: Synthetic peptide
  Seed: SIGKVCRTLLAKSVF
SIVKVWRQLLSKSVF

SEQ ID NO: 273937 - protein, 15 aa, Artificial Sequence
  Description of Artificial Sequence: Synthetic peptide
  Seed: SIGKVCRTLLAKSVF
SIVKVWRRLLAKSVF

SEQ ID NO: 273938 - protein, 15 aa, Artificial Sequence
  Description of Artificial Sequence: Synthetic peptide
  Seed: SIGKVCRTLLAKSVF
SIVKVWRRLLCKSVF

SEQ ID NO: 273939 - protein, 15 aa, Artificial Sequence
  Description of Artificial Sequence: Synthetic peptide
  Seed: SIGKVCRTLLAKSVF
SIVKVWRRLLDKSVF

SEQ ID NO: 273940 - protein, 15 aa, Artificial Sequence
  Description of Artificial Sequence: Synthetic peptide
  Seed: SIGKVCRTLLAKSVF
SIVKVWRRLLEKSVF

SEQ ID NO: 273941 - protein, 15 aa, Artificial Sequence
  Description of Artificial Sequence: Synthetic peptide
  Seed: SIGKVCRTLLAKSVF
SIVKVWRRLLFKSVF

SEQ ID NO: 273942 - protein, 15 aa, Artificial Sequence
  Description of Artificial Sequence: Synthetic peptide
  Seed: SIGKVCRTLLAKSVF
SIVKVWRRLLGKSVF

SEQ ID NO: 273943 - protein, 15 aa, Artificial Sequence
  Description of Artificial Sequence: Synthetic peptide
  Seed: SIGKVCRTLLAKSVF
SIVKVWRRLLHKSVF

SEQ ID NO: 273944 - protein, 15 aa, Artificial Sequence
  Description of Artificial Sequence: Synthetic peptide
  Seed: SIGKVCRTLLAKSVF
SIVKVWRRLLIKSVF

SEQ ID NO: 273945 - protein, 15 aa, Artificial Sequence
  Description of Artificial Sequence: Synthetic peptide
  Seed: SIGKVCRTLLAKSVF
SIVKVWRRLLKKSVF

SEQ ID NO: 273946 - protein, 15 aa, Artificial Sequence
  Description of Artificial Sequence: Synthetic peptide
  Seed: SIGKVCRTLLAKSVF
SIVKVWRRLLLKSVF

SEQ ID NO: 273947 - protein, 15 aa, Artificial Sequence
  Description of Artificial Sequence: Synthetic peptide
  Seed: SIGKVCRTLLAKSVF
SIVKVWRRLLMKSVF

SEQ ID NO: 273948 - protein, 15 aa, Artificial Sequence
  Description of Artificial Sequence: Synthetic peptide
  Seed: SIGKVCRTLLAKSVF
SIVKVWRRLLNKSVF

SEQ ID NO: 273949 - protein, 15 aa, Artificial Sequence
  Description of Artificial Sequence: Synthetic peptide
  Seed: SIGKVCRTLLAKSVF
SIVKVWRRLLPKSVF

SEQ ID NO: 273950 - protein, 15 aa, Artificial Sequence
  Description of Artificial Sequence: Synthetic peptide
  Seed: SIGKVCRTLLAKSVF
SIVKVWRRLLQKSVF

SEQ ID NO: 273951 - protein, 15 aa, Artificial Sequence
  Description of Artificial Sequence: Synthetic peptide
  Seed: SIGKVCRTLLAKSVF
SIVKVWRRLLRKSVF

SEQ ID NO: 273952 - protein, 15 aa, Artificial Sequence
  Description of Artificial Sequence: Synthetic peptide
  Seed: SIGKVCRTLLAKSVF
SIVKVWRRLLSKSVF

SEQ ID NO: 273953 - protein, 15 aa, Artificial Sequence
  Description of Artificial Sequence: Synthetic peptide
  Seed: SIGKVCRTLLAKSVF
SIVKVWRRLLTKSVF

SEQ ID NO: 273954 - protein, 15 aa, Artificial Sequence
  Description of Artificial Sequence: Synthetic peptide
  Seed: SIGKVCRTLLAKSVF
SIVKVWRRLLVKSVF

SEQ ID NO: 273955 - protein, 15 aa, Artificial Sequence
  Description of Artificial Sequence: Synthetic peptide
  Seed: SIGKVCRTLLAKSVF
SIVKVWRRLLWKSVF

SEQ ID NO: 273956 - protein, 15 aa, Artificial Sequence
  Description of Artificial Sequence: Synthetic peptide
  Seed: SIGKVCRTLLAKSVF
SIVKVWRRLLYKSVF

SEQ ID NO: 273957 - protein, 15 aa, Artificial Sequence
  Description of Artificial Sequence: Synthetic peptide
  Seed: SIGKVCRTLLAKSVF
SIVKVWRSLLAKSVF

SEQ ID NO: 273958 - protein, 15 aa, Artificial Sequence
  Description of Artificial Sequence: Synthetic peptide
  Seed: SIGKVCRTLLAKSVF
SIVKVWRSLLGKSVF

SEQ ID NO: 273959 - protein, 15 aa, Artificial Sequence
  Description of Artificial Sequence: Synthetic peptide
  Seed: SIGKVCRTLLAKSVF
SIVKVWRSLLHKSVF

SEQ ID NO: 273960 - protein, 15 aa, Artificial Sequence
  Description of Artificial Sequence: Synthetic peptide
  Seed: SIGKVCRTLLAKSVF
SIVKVWRSLLKKSVF

SEQ ID NO: 273961 - protein, 15 aa, Artificial Sequence
  Description of Artificial Sequence: Synthetic peptide
  Seed: SIGKVCRTLLAKSVF
SIVKVWRSLLQKSVF

SEQ ID NO: 273962 - protein, 15 aa, Artificial Sequence
  Description of Artificial Sequence: Synthetic peptide
  Seed: SIGKVCRTLLAKSVF
SIVKVWRSLLRKSVF

SEQ ID NO: 273963 - protein, 15 aa, Artificial Sequence
  Description of Artificial Sequence: Synthetic peptide
  Seed: SIGKVCRTLLAKSVF
SIVKVWRSLLSKSVF

SEQ ID NO: 273964 - protein, 15 aa, Artificial Sequence
  Description of Artificial Sequence: Synthetic peptide
  Seed: SIGKVCRTLLAKSVF
SIVKVWRTLLAKSVF

SEQ ID NO: 273965 - protein, 15 aa, Artificial Sequence
  Description of Artificial Sequence: Synthetic peptide
  Seed: SIGKVCRTLLAKSVF
SIVKVWRTLLHKSVF

SEQ ID NO: 273966 - protein, 15 aa, Artificial Sequence
  Description of Artificial Sequence: Synthetic peptide
  Seed: SIGKVCRTLLAKSVF
SIVKVWRTLLKKSVF

SEQ ID NO: 273967 - protein, 15 aa, Artificial Sequence
  Description of Artificial Sequence: Synthetic peptide
  Seed: SIGKVCRTLLAKSVF
SIVKVWRTLLRKSVF

SEQ ID NO: 273968 - protein, 15 aa, Artificial Sequence
  Description of Artificial Sequence: Synthetic peptide
  Seed: SIGKVCRTLLAKSVF
SIVKVWRTLLSKSVF

SEQ ID NO: 273969 - protein, 15 aa, Artificial Sequence
  Description of Artificial Sequence: Synthetic peptide
  Seed: SIGKVCRTLLAKSVF
SIVKVWRVLLRKSVF

SEQ ID NO: 273970 - protein, 15 aa, Artificial Sequence
  Description of Artificial Sequence: Synthetic peptide
  Seed: SIGKVCRTLLAKSVF
SIVKVYRALLAKSVF

SEQ ID NO: 273971 - protein, 15 aa, Artificial Sequence
  Description of Artificial Sequence: Synthetic peptide
  Seed: SIGKVCRTLLAKSVF
SIVKVYRALLQKSVF

SEQ ID NO: 273972 - protein, 15 aa, Artificial Sequence
  Description of Artificial Sequence: Synthetic peptide
  Seed: SIGKVCRTLLAKSVF
SIVKVYRALLSKSVF

SEQ ID NO: 273973 - protein, 15 aa, Artificial Sequence
  Description of Artificial Sequence: Synthetic peptide
  Seed: SIGKVCRTLLAKSVF
SIVKVYRELLRKSVF

SEQ ID NO: 273974 - protein, 15 aa, Artificial Sequence
  Description of Artificial Sequence: Synthetic peptide
  Seed: SIGKVCRTLLAKSVF
SIVKVYRHLLAKSVF

SEQ ID NO: 273975 - protein, 15 aa, Artificial Sequence
  Description of Artificial Sequence: Synthetic peptide
  Seed: SIGKVCRTLLAKSVF
SIVKVYRHLLGKSVF

SEQ ID NO: 273976 - protein, 15 aa, Artificial Sequence
  Description of Artificial Sequence: Synthetic peptide
  Seed: SIGKVCRTLLAKSVF
SIVKVYRHLLHKSVF

SEQ ID NO: 273977 - protein, 15 aa, Artificial Sequence
  Description of Artificial Sequence: Synthetic peptide
  Seed: SIGKVCRTLLAKSVF
SIVKVYRHLLQKSVF

SEQ ID NO: 273978 - protein, 15 aa, Artificial Sequence
  Description of Artificial Sequence: Synthetic peptide
  Seed: SIGKVCRTLLAKSVF
SIVKVYRHLLSKSVF

SEQ ID NO: 273979 - protein, 15 aa, Artificial Sequence
  Description of Artificial Sequence: Synthetic peptide
  Seed: SIGKVCRTLLAKSVF
SIVKVYRKLLAKSVF

SEQ ID NO: 273980 - protein, 15 aa, Artificial Sequence
  Description of Artificial Sequence: Synthetic peptide
  Seed: SIGKVCRTLLAKSVF
SIVKVYRKLLEKSVF

SEQ ID NO: 273981 - protein, 15 aa, Artificial Sequence
  Description of Artificial Sequence: Synthetic peptide
  Seed: SIGKVCRTLLAKSVF
SIVKVYRKLLFKSVF

SEQ ID NO: 273982 - protein, 15 aa, Artificial Sequence
  Description of Artificial Sequence: Synthetic peptide
  Seed: SIGKVCRTLLAKSVF
SIVKVYRKLLGKSVF

SEQ ID NO: 273983 - protein, 15 aa, Artificial Sequence
  Description of Artificial Sequence: Synthetic peptide
  Seed: SIGKVCRTLLAKSVF
SIVKVYRKLLHKSVF

SEQ ID NO: 273984 - protein, 15 aa, Artificial Sequence
  Description of Artificial Sequence: Synthetic peptide
  Seed: SIGKVCRTLLAKSVF
SIVKVYRKLLIKSVF

SEQ ID NO: 273985 - protein, 15 aa, Artificial Sequence
  Description of Artificial Sequence: Synthetic peptide
  Seed: SIGKVCRTLLAKSVF
SIVKVYRKLLKKSVF

SEQ ID NO: 273986 - protein, 15 aa, Artificial Sequence
  Description of Artificial Sequence: Synthetic peptide
  Seed: SIGKVCRTLLAKSVF
SIVKVYRKLLLKSVF

SEQ ID NO: 273987 - protein, 15 aa, Artificial Sequence
  Description of Artificial Sequence: Synthetic peptide
  Seed: SIGKVCRTLLAKSVF
SIVKVYRKLLMKSVF

SEQ ID NO: 273988 - protein, 15 aa, Artificial Sequence
  Description of Artificial Sequence: Synthetic peptide
  Seed: SIGKVCRTLLAKSVF
SIVKVYRKLLNKSVF

SEQ ID NO: 273989 - protein, 15 aa, Artificial Sequence
  Description of Artificial Sequence: Synthetic peptide
  Seed: SIGKVCRTLLAKSVF
SIVKVYRKLLPKSVF

SEQ ID NO: 273990 - protein, 15 aa, Artificial Sequence
  Description of Artificial Sequence: Synthetic peptide
  Seed: SIGKVCRTLLAKSVF
SIVKVYRKLLQKSVF

SEQ ID NO: 273991 - protein, 15 aa, Artificial Sequence
  Description of Artificial Sequence: Synthetic peptide
  Seed: SIGKVCRTLLAKSVF
SIVKVYRKLLRKSVF

SEQ ID NO: 273992 - protein, 15 aa, Artificial Sequence
  Description of Artificial Sequence: Synthetic peptide
  Seed: SIGKVCRTLLAKSVF
SIVKVYRKLLSKSVF

SEQ ID NO: 273993 - protein, 15 aa, Artificial Sequence
  Description of Artificial Sequence: Synthetic peptide
  Seed: SIGKVCRTLLAKSVF
SIVKVYRKLLTKSVF

SEQ ID NO: 273994 - protein, 15 aa, Artificial Sequence
  Description of Artificial Sequence: Synthetic peptide
  Seed: SIGKVCRTLLAKSVF
SIVKVYRKLLVKSVF

SEQ ID NO: 273995 - protein, 15 aa, Artificial Sequence
  Description of Artificial Sequence: Synthetic peptide
  Seed: SIGKVCRTLLAKSVF
SIVKVYRKLLYKSVF

SEQ ID NO: 273996 - protein, 15 aa, Artificial Sequence
  Description of Artificial Sequence: Synthetic peptide
  Seed: SIGKVCRTLLAKSVF
SIVKVYRNLLAKSVF

SEQ ID NO: 273997 - protein, 15 aa, Artificial Sequence
  Description of Artificial Sequence: Synthetic peptide
  Seed: SIGKVCRTLLAKSVF
SIVKVYRPLLAKSVF

SEQ ID NO: 273998 - protein, 15 aa, Artificial Sequence
  Description of Artificial Sequence: Synthetic peptide
  Seed: SIGKVCRTLLAKSVF
SIVKVYRRLLAKSVF

SEQ ID NO: 273999 - protein, 15 aa, Artificial Sequence
  Description of Artificial Sequence: Synthetic peptide
  Seed: SIGKVCRTLLAKSVF
SIVKVYRRLLCKSVF

SEQ ID NO: 274000 - protein, 15 aa, Artificial Sequence
  Description of Artificial Sequence: Synthetic peptide
  Seed: SIGKVCRTLLAKSVF
SIVKVYRRLLDKSVF

SEQ ID NO: 274001 - protein, 15 aa, Artificial Sequence
  Description of Artificial Sequence: Synthetic peptide
  Seed: SIGKVCRTLLAKSVF
SIVKVYRRLLEKSVF

SEQ ID NO: 274002 - protein, 15 aa, Artificial Sequence
  Description of Artificial Sequence: Synthetic peptide
  Seed: SIGKVCRTLLAKSVF
SIVKVYRRLLFKSVF

SEQ ID NO: 274003 - protein, 15 aa, Artificial Sequence
  Description of Artificial Sequence: Synthetic peptide
  Seed: SIGKVCRTLLAKSVF
SIVKVYRRLLGKSVF

SEQ ID NO: 274004 - protein, 15 aa, Artificial Sequence
  Description of Artificial Sequence: Synthetic peptide
  Seed: SIGKVCRTLLAKSVF
SIVKVYRRLLHKSVF

SEQ ID NO: 274005 - protein, 15 aa, Artificial Sequence
  Description of Artificial Sequence: Synthetic peptide
  Seed: SIGKVCRTLLAKSVF
SIVKVYRRLLIKSVF

SEQ ID NO: 274006 - protein, 15 aa, Artificial Sequence
  Description of Artificial Sequence: Synthetic peptide
  Seed: SIGKVCRTLLAKSVF
SIVKVYRRLLKKSVF

SEQ ID NO: 274007 - protein, 15 aa, Artificial Sequence
  Description of Artificial Sequence: Synthetic peptide
  Seed: SIGKVCRTLLAKSVF
SIVKVYRRLLLKSVF

SEQ ID NO: 274008 - protein, 15 aa, Artificial Sequence
  Description of Artificial Sequence: Synthetic peptide
  Seed: SIGKVCRTLLAKSVF
SIVKVYRRLLMKSVF

SEQ ID NO: 274009 - protein, 15 aa, Artificial Sequence
  Description of Artificial Sequence: Synthetic peptide
  Seed: SIGKVCRTLLAKSVF
SIVKVYRRLLNKSVF

SEQ ID NO: 274010 - protein, 15 aa, Artificial Sequence
  Description of Artificial Sequence: Synthetic peptide
  Seed: SIGKVCRTLLAKSVF
SIVKVYRRLLPKSVF

SEQ ID NO: 274011 - protein, 15 aa, Artificial Sequence
  Description of Artificial Sequence: Synthetic peptide
  Seed: SIGKVCRTLLAKSVF
SIVKVYRRLLQKSVF

SEQ ID NO: 274012 - protein, 15 aa, Artificial Sequence
  Description of Artificial Sequence: Synthetic peptide
  Seed: SIGKVCRTLLAKSVF
SIVKVYRRLLRKSVF

SEQ ID NO: 274013 - protein, 15 aa, Artificial Sequence
  Description of Artificial Sequence: Synthetic peptide
  Seed: SIGKVCRTLLAKSVF
SIVKVYRRLLSKSVF

SEQ ID NO: 274014 - protein, 15 aa, Artificial Sequence
  Description of Artificial Sequence: Synthetic peptide
  Seed: SIGKVCRTLLAKSVF
SIVKVYRRLLTKSVF

SEQ ID NO: 274015 - protein, 15 aa, Artificial Sequence
  Description of Artificial Sequence: Synthetic peptide
  Seed: SIGKVCRTLLAKSVF
SIVKVYRRLLVKSVF

SEQ ID NO: 274016 - protein, 15 aa, Artificial Sequence
  Description of Artificial Sequence: Synthetic peptide
  Seed: SIGKVCRTLLAKSVF
SIVKVYRRLLYKSVF

SEQ ID NO: 274017 - protein, 15 aa, Artificial Sequence
  Description of Artificial Sequence: Synthetic peptide
  Seed: SIGKVCRTLLAKSVF
SIVKVYRSLLAKSVF

SEQ ID NO: 274018 - protein, 15 aa, Artificial Sequence
  Description of Artificial Sequence: Synthetic peptide
  Seed: SIGKVCRTLLAKSVF
SIVKVYRSLLHKSVF

SEQ ID NO: 274019 - protein, 15 aa, Artificial Sequence
  Description of Artificial Sequence: Synthetic peptide
  Seed: SIGKVCRTLLAKSVF
SIVKVYRSLLRKSVF

SEQ ID NO: 274020 - protein, 15 aa, Artificial Sequence
  Description of Artificial Sequence: Synthetic peptide
  Seed: SIGKVCRTLLAKSVF
SIVKVYRSLLSKSVF

SEQ ID NO: 274021 - protein, 15 aa, Artificial Sequence
  Description of Artificial Sequence: Synthetic peptide
  Seed: SIGKVCRTLLAKSVF
SIVKVYRTLLAKSVF

SEQ ID NO: 274022 - protein, 15 aa, Artificial Sequence
  Description of Artificial Sequence: Synthetic peptide
  Seed: SIGKVCRTLLAKSVF
SIVKVYRTLLHKSVF

SEQ ID NO: 274023 - protein, 15 aa, Artificial Sequence
  Description of Artificial Sequence: Synthetic peptide
  Seed: SIGKVCRTLLAKSVF
SIVKVYRTLLRKSVF

SEQ ID NO: 274024 - protein, 15 aa, Artificial Sequence
  Description of Artificial Sequence: Synthetic peptide
  Seed: SIGKVCRTLLAKSVF
SIVKVYRTLLSKSVF

SEQ ID NO: 274025 - protein, 15 aa, Artificial Sequence
  Description of Artificial Sequence: Synthetic peptide
  Seed: SIGKVCRTLLAKSVF
SIVKVYRVLLHKSVF

SEQ ID NO: 274026 - protein, 15 aa, Artificial Sequence
  Description of Artificial Sequence: Synthetic peptide
  Seed: SIGKVCRTLLAKSVF
SIWKVARALLAKSVF

SEQ ID NO: 274027 - protein, 15 aa, Artificial Sequence
  Description of Artificial Sequence: Synthetic peptide
  Seed: SIGKVCRTLLAKSVF
SIWKVARALLHKSVF

SEQ ID NO: 274028 - protein, 15 aa, Artificial Sequence
  Description of Artificial Sequence: Synthetic peptide
  Seed: SIGKVCRTLLAKSVF
SIWKVARALLKKSVF

SEQ ID NO: 274029 - protein, 15 aa, Artificial Sequence
  Description of Artificial Sequence: Synthetic peptide
  Seed: SIGKVCRTLLAKSVF
SIWKVARALLRKSVF

SEQ ID NO: 274030 - protein, 15 aa, Artificial Sequence
  Description of Artificial Sequence: Synthetic peptide
  Seed: SIGKVCRTLLAKSVF
SIWKVARALLSKSVF

SEQ ID NO: 274031 - protein, 15 aa, Artificial Sequence
  Description of Artificial Sequence: Synthetic peptide
  Seed: SIGKVCRTLLAKSVF
SIWKVARHLLAKSVF

SEQ ID NO: 274032 - protein, 15 aa, Artificial Sequence
  Description of Artificial Sequence: Synthetic peptide
  Seed: SIGKVCRTLLAKSVF
SIWKVARHLLGKSVF

SEQ ID NO: 274033 - protein, 15 aa, Artificial Sequence
  Description of Artificial Sequence: Synthetic peptide
  Seed: SIGKVCRTLLAKSVF
SIWKVARHLLHKSVF

SEQ ID NO: 274034 - protein, 15 aa, Artificial Sequence
  Description of Artificial Sequence: Synthetic peptide
  Seed: SIGKVCRTLLAKSVF
SIWKVARHLLQKSVF

SEQ ID NO: 274035 - protein, 15 aa, Artificial Sequence
  Description of Artificial Sequence: Synthetic peptide
  Seed: SIGKVCRTLLAKSVF
SIWKVARHLLSKSVF

SEQ ID NO: 274036 - protein, 15 aa, Artificial Sequence
  Description of Artificial Sequence: Synthetic peptide
  Seed: SIGKVCRTLLAKSVF
SIWKVARILLRKSVF

SEQ ID NO: 274037 - protein, 15 aa, Artificial Sequence
  Description of Artificial Sequence: Synthetic peptide
  Seed: SIGKVCRTLLAKSVF
SIWKVARKLLAKSVF

SEQ ID NO: 274038 - protein, 15 aa, Artificial Sequence
  Description of Artificial Sequence: Synthetic peptide
  Seed: SIGKVCRTLLAKSVF
SIWKVARKLLCKSVF

SEQ ID NO: 274039 - protein, 15 aa, Artificial Sequence
  Description of Artificial Sequence: Synthetic peptide
  Seed: SIGKVCRTLLAKSVF
SIWKVARKLLDKSVF

SEQ ID NO: 274040 - protein, 15 aa, Artificial Sequence
  Description of Artificial Sequence: Synthetic peptide
  Seed: SIGKVCRTLLAKSVF
SIWKVARKLLEKSVF

SEQ ID NO: 274041 - protein, 15 aa, Artificial Sequence
  Description of Artificial Sequence: Synthetic peptide
  Seed: SIGKVCRTLLAKSVF
SIWKVARKLLGKSVF

SEQ ID NO: 274042 - protein, 15 aa, Artificial Sequence
  Description of Artificial Sequence: Synthetic peptide
  Seed: SIGKVCRTLLAKSVF
SIWKVARKLLHKSVF

SEQ ID NO: 274043 - protein, 15 aa, Artificial Sequence
  Description of Artificial Sequence: Synthetic peptide
  Seed: SIGKVCRTLLAKSVF
SIWKVARKLLIKSVF

SEQ ID NO: 274044 - protein, 15 aa, Artificial Sequence
  Description of Artificial Sequence: Synthetic peptide
  Seed: SIGKVCRTLLAKSVF
SIWKVARKLLKKSVF

SEQ ID NO: 274045 - protein, 15 aa, Artificial Sequence
  Description of Artificial Sequence: Synthetic peptide
  Seed: SIGKVCRTLLAKSVF
SIWKVARKLLLKSVF

SEQ ID NO: 274046 - protein, 15 aa, Artificial Sequence
  Description of Artificial Sequence: Synthetic peptide
  Seed: SIGKVCRTLLAKSVF
SIWKVARKLLMKSVF

SEQ ID NO: 274047 - protein, 15 aa, Artificial Sequence
  Description of Artificial Sequence: Synthetic peptide
  Seed: SIGKVCRTLLAKSVF
SIWKVARKLLNKSVF

SEQ ID NO: 274048 - protein, 15 aa, Artificial Sequence
  Description of Artificial Sequence: Synthetic peptide
  Seed: SIGKVCRTLLAKSVF
SIWKVARKLLPKSVF

SEQ ID NO: 274049 - protein, 15 aa, Artificial Sequence
  Description of Artificial Sequence: Synthetic peptide
  Seed: SIGKVCRTLLAKSVF
SIWKVARKLLQKSVF

SEQ ID NO: 274050 - protein, 15 aa, Artificial Sequence
  Description of Artificial Sequence: Synthetic peptide
  Seed: SIGKVCRTLLAKSVF
SIWKVARKLLRKSVF

SEQ ID NO: 274051 - protein, 15 aa, Artificial Sequence
  Description of Artificial Sequence: Synthetic peptide
  Seed: SIGKVCRTLLAKSVF
SIWKVARKLLSKSVF

SEQ ID NO: 274052 - protein, 15 aa, Artificial Sequence
  Description of Artificial Sequence: Synthetic peptide
  Seed: SIGKVCRTLLAKSVF
SIWKVARKLLTKSVF

SEQ ID NO: 274053 - protein, 15 aa, Artificial Sequence
  Description of Artificial Sequence: Synthetic peptide
  Seed: SIGKVCRTLLAKSVF
SIWKVARKLLVKSVF

SEQ ID NO: 274054 - protein, 15 aa, Artificial Sequence
  Description of Artificial Sequence: Synthetic peptide
  Seed: SIGKVCRTLLAKSVF
SIWKVARKLLYKSVF

SEQ ID NO: 274055 - protein, 15 aa, Artificial Sequence
  Description of Artificial Sequence: Synthetic peptide
  Seed: SIGKVCRTLLAKSVF
SIWKVARNLLAKSVF

SEQ ID NO: 274056 - protein, 15 aa, Artificial Sequence
  Description of Artificial Sequence: Synthetic peptide
  Seed: SIGKVCRTLLAKSVF
SIWKVARNLLDKSVF

SEQ ID NO: 274057 - protein, 15 aa, Artificial Sequence
  Description of Artificial Sequence: Synthetic peptide
  Seed: SIGKVCRTLLAKSVF
SIWKVARNLLEKSVF

SEQ ID NO: 274058 - protein, 15 aa, Artificial Sequence
  Description of Artificial Sequence: Synthetic peptide
  Seed: SIGKVCRTLLAKSVF
SIWKVARNLLGKSVF

SEQ ID NO: 274059 - protein, 15 aa, Artificial Sequence
  Description of Artificial Sequence: Synthetic peptide
  Seed: SIGKVCRTLLAKSVF
SIWKVARNLLSKSVF

SEQ ID NO: 274060 - protein, 15 aa, Artificial Sequence
  Description of Artificial Sequence: Synthetic peptide
  Seed: SIGKVCRTLLAKSVF
SIWKVARPLLAKSVF

SEQ ID NO: 274061 - protein, 15 aa, Artificial Sequence
  Description of Artificial Sequence: Synthetic peptide
  Seed: SIGKVCRTLLAKSVF
SIWKVARPLLSKSVF

SEQ ID NO: 274062 - protein, 15 aa, Artificial Sequence
  Description of Artificial Sequence: Synthetic peptide
  Seed: SIGKVCRTLLAKSVF
SIWKVARRLLAKSVF

SEQ ID NO: 274063 - protein, 15 aa, Artificial Sequence
  Description of Artificial Sequence: Synthetic peptide
  Seed: SIGKVCRTLLAKSVF
SIWKVARRLLCKSVF

SEQ ID NO: 274064 - protein, 15 aa, Artificial Sequence
  Description of Artificial Sequence: Synthetic peptide
  Seed: SIGKVCRTLLAKSVF
SIWKVARRLLDKSVF

SEQ ID NO: 274065 - protein, 15 aa, Artificial Sequence
  Description of Artificial Sequence: Synthetic peptide
  Seed: SIGKVCRTLLAKSVF
SIWKVARRLLEKSVF

SEQ ID NO: 274066 - protein, 15 aa, Artificial Sequence
  Description of Artificial Sequence: Synthetic peptide
  Seed: SIGKVCRTLLAKSVF
SIWKVARRLLFKSVF

SEQ ID NO: 274067 - protein, 15 aa, Artificial Sequence
  Description of Artificial Sequence: Synthetic peptide
  Seed: SIGKVCRTLLAKSVF
SIWKVARRLLGKSVF

SEQ ID NO: 274068 - protein, 15 aa, Artificial Sequence
  Description of Artificial Sequence: Synthetic peptide
  Seed: SIGKVCRTLLAKSVF
SIWKVARRLLHKSVF

SEQ ID NO: 274069 - protein, 15 aa, Artificial Sequence
  Description of Artificial Sequence: Synthetic peptide
  Seed: SIGKVCRTLLAKSVF
SIWKVARRLLIKSVF

SEQ ID NO: 274070 - protein, 15 aa, Artificial Sequence
  Description of Artificial Sequence: Synthetic peptide
  Seed: SIGKVCRTLLAKSVF
SIWKVARRLLKKSVF

SEQ ID NO: 274071 - protein, 15 aa, Artificial Sequence
  Description of Artificial Sequence: Synthetic peptide
  Seed: SIGKVCRTLLAKSVF
SIWKVARRLLLKSVF

SEQ ID NO: 274072 - protein, 15 aa, Artificial Sequence
  Description of Artificial Sequence: Synthetic peptide
  Seed: SIGKVCRTLLAKSVF
SIWKVARRLLMKSVF

SEQ ID NO: 274073 - protein, 15 aa, Artificial Sequence
  Description of Artificial Sequence: Synthetic peptide
  Seed: SIGKVCRTLLAKSVF
SIWKVARRLLNKSVF

SEQ ID NO: 274074 - protein, 15 aa, Artificial Sequence
  Description of Artificial Sequence: Synthetic peptide
  Seed: SIGKVCRTLLAKSVF
SIWKVARRLLPKSVF

SEQ ID NO: 274075 - protein, 15 aa, Artificial Sequence
  Description of Artificial Sequence: Synthetic peptide
  Seed: SIGKVCRTLLAKSVF
SIWKVARRLLQKSVF

SEQ ID NO: 274076 - protein, 15 aa, Artificial Sequence
  Description of Artificial Sequence: Synthetic peptide
  Seed: SIGKVCRTLLAKSVF
SIWKVARRLLRKSVF

SEQ ID NO: 274077 - protein, 15 aa, Artificial Sequence
  Description of Artificial Sequence: Synthetic peptide
  Seed: SIGKVCRTLLAKSVF
SIWKVARRLLSKSVF

SEQ ID NO: 274078 - protein, 15 aa, Artificial Sequence
  Description of Artificial Sequence: Synthetic peptide
  Seed: SIGKVCRTLLAKSVF
SIWKVARRLLTKSVF

SEQ ID NO: 274079 - protein, 15 aa, Artificial Sequence
  Description of Artificial Sequence: Synthetic peptide
  Seed: SIGKVCRTLLAKSVF
SIWKVARRLLVKSVF

SEQ ID NO: 274080 - protein, 15 aa, Artificial Sequence
  Description of Artificial Sequence: Synthetic peptide
  Seed: SIGKVCRTLLAKSVF
SIWKVARRLLYKSVF

SEQ ID NO: 274081 - protein, 15 aa, Artificial Sequence
  Description of Artificial Sequence: Synthetic peptide
  Seed: SIGKVCRTLLAKSVF
SIWKVARSLLAKSVF

SEQ ID NO: 274082 - protein, 15 aa, Artificial Sequence
  Description of Artificial Sequence: Synthetic peptide
  Seed: SIGKVCRTLLAKSVF
SIWKVARSLLDKSVF

SEQ ID NO: 274083 - protein, 15 aa, Artificial Sequence
  Description of Artificial Sequence: Synthetic peptide
  Seed: SIGKVCRTLLAKSVF
SIWKVARSLLGKSVF

SEQ ID NO: 274084 - protein, 15 aa, Artificial Sequence
  Description of Artificial Sequence: Synthetic peptide
  Seed: SIGKVCRTLLAKSVF
SIWKVARSLLHKSVF

SEQ ID NO: 274085 - protein, 15 aa, Artificial Sequence
  Description of Artificial Sequence: Synthetic peptide
  Seed: SIGKVCRTLLAKSVF
SIWKVARSLLKKSVF

SEQ ID NO: 274086 - protein, 15 aa, Artificial Sequence
  Description of Artificial Sequence: Synthetic peptide
  Seed: SIGKVCRTLLAKSVF
SIWKVARSLLRKSVF

SEQ ID NO: 274087 - protein, 15 aa, Artificial Sequence
  Description of Artificial Sequence: Synthetic peptide
  Seed: SIGKVCRTLLAKSVF
SIWKVARSLLSKSVF

SEQ ID NO: 274088 - protein, 15 aa, Artificial Sequence
  Description of Artificial Sequence: Synthetic peptide
  Seed: SIGKVCRTLLAKSVF
SIWKVARTLLAKSVF

SEQ ID NO: 274089 - protein, 15 aa, Artificial Sequence
  Description of Artificial Sequence: Synthetic peptide
  Seed: SIGKVCRTLLAKSVF
SIWKVARTLLDKSVF

SEQ ID NO: 274090 - protein, 15 aa, Artificial Sequence
  Description of Artificial Sequence: Synthetic peptide
  Seed: SIGKVCRTLLAKSVF
SIWKVARTLLEKSVF

SEQ ID NO: 274091 - protein, 15 aa, Artificial Sequence
  Description of Artificial Sequence: Synthetic peptide
  Seed: SIGKVCRTLLAKSVF
SIWKVARTLLGKSVF

SEQ ID NO: 274092 - protein, 15 aa, Artificial Sequence
  Description of Artificial Sequence: Synthetic peptide
  Seed: SIGKVCRTLLAKSVF
SIWKVARTLLHKSVF

SEQ ID NO: 274093 - protein, 15 aa, Artificial Sequence
  Description of Artificial Sequence: Synthetic peptide
  Seed: SIGKVCRTLLAKSVF
SIWKVARTLLKKSVF

SEQ ID NO: 274094 - protein, 15 aa, Artificial Sequence
  Description of Artificial Sequence: Synthetic peptide
  Seed: SIGKVCRTLLAKSVF
SIWKVARTLLQKSVF

SEQ ID NO: 274095 - protein, 15 aa, Artificial Sequence
  Description of Artificial Sequence: Synthetic peptide
  Seed: SIGKVCRTLLAKSVF
SIWKVARTLLRKSVF

SEQ ID NO: 274096 - protein, 15 aa, Artificial Sequence
  Description of Artificial Sequence: Synthetic peptide
  Seed: SIGKVCRTLLAKSVF
SIWKVARTLLSKSVF

SEQ ID NO: 274097 - protein, 15 aa, Artificial Sequence
  Description of Artificial Sequence: Synthetic peptide
  Seed: SIGKVCRTLLAKSVF
SIWKVARVLLKKSVF

SEQ ID NO: 274098 - protein, 15 aa, Artificial Sequence
  Description of Artificial Sequence: Synthetic peptide
  Seed: SIGKVCRTLLAKSVF
SIWKVARVLLRKSVF

SEQ ID NO: 274099 - protein, 15 aa, Artificial Sequence
  Description of Artificial Sequence: Synthetic peptide
  Seed: SIGKVCRTLLAKSVF
SIWKVCRALLRKSVF

SEQ ID NO: 274100 - protein, 15 aa, Artificial Sequence
  Description of Artificial Sequence: Synthetic peptide
  Seed: SIGKVCRTLLAKSVF
SIWKVCRHLLRKSVF

SEQ ID NO: 274101 - protein, 15 aa, Artificial Sequence
  Description of Artificial Sequence: Synthetic peptide
  Seed: SIGKVCRTLLAKSVF
SIWKVCRILLRKSVF

SEQ ID NO: 274102 - protein, 15 aa, Artificial Sequence
  Description of Artificial Sequence: Synthetic peptide
  Seed: SIGKVCRTLLAKSVF
SIWKVCRKLLAKSVF

SEQ ID NO: 274103 - protein, 15 aa, Artificial Sequence
  Description of Artificial Sequence: Synthetic peptide
  Seed: SIGKVCRTLLAKSVF
SIWKVCRKLLGKSVF

SEQ ID NO: 274104 - protein, 15 aa, Artificial Sequence
  Description of Artificial Sequence: Synthetic peptide
  Seed: SIGKVCRTLLAKSVF
SIWKVCRKLLHKSVF

SEQ ID NO: 274105 - protein, 15 aa, Artificial Sequence
  Description of Artificial Sequence: Synthetic peptide
  Seed: SIGKVCRTLLAKSVF
SIWKVCRKLLKKSVF

SEQ ID NO: 274106 - protein, 15 aa, Artificial Sequence
  Description of Artificial Sequence: Synthetic peptide
  Seed: SIGKVCRTLLAKSVF
SIWKVCRKLLNKSVF

SEQ ID NO: 274107 - protein, 15 aa, Artificial Sequence
  Description of Artificial Sequence: Synthetic peptide
  Seed: SIGKVCRTLLAKSVF
SIWKVCRKLLQKSVF

SEQ ID NO: 274108 - protein, 15 aa, Artificial Sequence
  Description of Artificial Sequence: Synthetic peptide
  Seed: SIGKVCRTLLAKSVF
SIWKVCRKLLRKSVF

SEQ ID NO: 274109 - protein, 15 aa, Artificial Sequence
  Description of Artificial Sequence: Synthetic peptide
  Seed: SIGKVCRTLLAKSVF
SIWKVCRKLLSKSVF

SEQ ID NO: 274110 - protein, 15 aa, Artificial Sequence
  Description of Artificial Sequence: Synthetic peptide
  Seed: SIGKVCRTLLAKSVF
SIWKVCRKLLTKSVF

SEQ ID NO: 274111 - protein, 15 aa, Artificial Sequence
  Description of Artificial Sequence: Synthetic peptide
  Seed: SIGKVCRTLLAKSVF
SIWKVCRLLLRKSVF

SEQ ID NO: 274112 - protein, 15 aa, Artificial Sequence
  Description of Artificial Sequence: Synthetic peptide
  Seed: SIGKVCRTLLAKSVF
SIWKVCRMLLRKSVF

SEQ ID NO: 274113 - protein, 15 aa, Artificial Sequence
  Description of Artificial Sequence: Synthetic peptide
  Seed: SIGKVCRTLLAKSVF
SIWKVCRRLLAKSVF

SEQ ID NO: 274114 - protein, 15 aa, Artificial Sequence
  Description of Artificial Sequence: Synthetic peptide
  Seed: SIGKVCRTLLAKSVF
SIWKVCRRLLGKSVF

SEQ ID NO: 274115 - protein, 15 aa, Artificial Sequence
  Description of Artificial Sequence: Synthetic peptide
  Seed: SIGKVCRTLLAKSVF
SIWKVCRRLLHKSVF

SEQ ID NO: 274116 - protein, 15 aa, Artificial Sequence
  Description of Artificial Sequence: Synthetic peptide
  Seed: SIGKVCRTLLAKSVF
SIWKVCRRLLKKSVF

SEQ ID NO: 274117 - protein, 15 aa, Artificial Sequence
  Description of Artificial Sequence: Synthetic peptide
  Seed: SIGKVCRTLLAKSVF
SIWKVCRRLLMKSVF

SEQ ID NO: 274118 - protein, 15 aa, Artificial Sequence
  Description of Artificial Sequence: Synthetic peptide
  Seed: SIGKVCRTLLAKSVF
SIWKVCRRLLNKSVF

SEQ ID NO: 274119 - protein, 15 aa, Artificial Sequence
  Description of Artificial Sequence: Synthetic peptide
  Seed: SIGKVCRTLLAKSVF
SIWKVCRRLLQKSVF

SEQ ID NO: 274120 - protein, 15 aa, Artificial Sequence
  Description of Artificial Sequence: Synthetic peptide
  Seed: SIGKVCRTLLAKSVF
SIWKVCRRLLRKSVF

SEQ ID NO: 274121 - protein, 15 aa, Artificial Sequence
  Description of Artificial Sequence: Synthetic peptide
  Seed: SIGKVCRTLLAKSVF
SIWKVCRRLLSKSVF

SEQ ID NO: 274122 - protein, 15 aa, Artificial Sequence
  Description of Artificial Sequence: Synthetic peptide
  Seed: SIGKVCRTLLAKSVF
SIWKVCRRLLTKSVF

SEQ ID NO: 274123 - protein, 15 aa, Artificial Sequence
  Description of Artificial Sequence: Synthetic peptide
  Seed: SIGKVCRTLLAKSVF
SIWKVCRRLLVKSVF

SEQ ID NO: 274124 - protein, 15 aa, Artificial Sequence
  Description of Artificial Sequence: Synthetic peptide
  Seed: SIGKVCRTLLAKSVF
SIWKVCRRLLYKSVF

SEQ ID NO: 274125 - protein, 15 aa, Artificial Sequence
  Description of Artificial Sequence: Synthetic peptide
  Seed: SIGKVCRTLLAKSVF
SIWKVCRSLLRKSVF

SEQ ID NO: 274126 - protein, 15 aa, Artificial Sequence
  Description of Artificial Sequence: Synthetic peptide
  Seed: SIGKVCRTLLAKSVF
SIWKVCRVLLRKSVF

SEQ ID NO: 274127 - protein, 15 aa, Artificial Sequence
  Description of Artificial Sequence: Synthetic peptide
  Seed: SIGKVCRTLLAKSVF
SIWKVDRNLLAKSVF

SEQ ID NO: 274128 - protein, 15 aa, Artificial Sequence
  Description of Artificial Sequence: Synthetic peptide
  Seed: SIGKVCRTLLAKSVF
SIWKVDRNLLGKSVF

SEQ ID NO: 274129 - protein, 15 aa, Artificial Sequence
  Description of Artificial Sequence: Synthetic peptide
  Seed: SIGKVCRTLLAKSVF
SIWKVDRNLLSKSVF

SEQ ID NO: 274130 - protein, 15 aa, Artificial Sequence
  Description of Artificial Sequence: Synthetic peptide
  Seed: SIGKVCRTLLAKSVF
SIWKVDRSLLAKSVF

SEQ ID NO: 274131 - protein, 15 aa, Artificial Sequence
  Description of Artificial Sequence: Synthetic peptide
  Seed: SIGKVCRTLLAKSVF
SIWKVDRSLLSKSVF

SEQ ID NO: 274132 - protein, 15 aa, Artificial Sequence
  Description of Artificial Sequence: Synthetic peptide
  Seed: SIGKVCRTLLAKSVF
SIWKVDRTLLAKSVF

SEQ ID NO: 274133 - protein, 15 aa, Artificial Sequence
  Description of Artificial Sequence: Synthetic peptide
  Seed: SIGKVCRTLLAKSVF
SIWKVDRTLLGKSVF

SEQ ID NO: 274134 - protein, 15 aa, Artificial Sequence
  Description of Artificial Sequence: Synthetic peptide
  Seed: SIGKVCRTLLAKSVF
SIWKVDRTLLSKSVF

SEQ ID NO: 274135 - protein, 15 aa, Artificial Sequence
  Description of Artificial Sequence: Synthetic peptide
  Seed: SIGKVCRTLLAKSVF
SIWKVERKLLAKSVF

SEQ ID NO: 274136 - protein, 15 aa, Artificial Sequence
  Description of Artificial Sequence: Synthetic peptide
  Seed: SIGKVCRTLLAKSVF
SIWKVERKLLSKSVF

SEQ ID NO: 274137 - protein, 15 aa, Artificial Sequence
  Description of Artificial Sequence: Synthetic peptide
  Seed: SIGKVCRTLLAKSVF
SIWKVERRLLAKSVF

SEQ ID NO: 274138 - protein, 15 aa, Artificial Sequence
  Description of Artificial Sequence: Synthetic peptide
  Seed: SIGKVCRTLLAKSVF
SIWKVERRLLGKSVF

SEQ ID NO: 274139 - protein, 15 aa, Artificial Sequence
  Description of Artificial Sequence: Synthetic peptide
  Seed: SIGKVCRTLLAKSVF
SIWKVERRLLHKSVF

SEQ ID NO: 274140 - protein, 15 aa, Artificial Sequence
  Description of Artificial Sequence: Synthetic peptide
  Seed: SIGKVCRTLLAKSVF
SIWKVERRLLKKSVF

SEQ ID NO: 274141 - protein, 15 aa, Artificial Sequence
  Description of Artificial Sequence: Synthetic peptide
  Seed: SIGKVCRTLLAKSVF
SIWKVERRLLQKSVF

SEQ ID NO: 274142 - protein, 15 aa, Artificial Sequence
  Description of Artificial Sequence: Synthetic peptide
  Seed: SIGKVCRTLLAKSVF
SIWKVERRLLRKSVF

SEQ ID NO: 274143 - protein, 15 aa, Artificial Sequence
  Description of Artificial Sequence: Synthetic peptide
  Seed: SIGKVCRTLLAKSVF
SIWKVERRLLSKSVF

SEQ ID NO: 274144 - protein, 15 aa, Artificial Sequence
  Description of Artificial Sequence: Synthetic peptide
  Seed: SIGKVCRTLLAKSVF
SIWKVERTLLAKSVF

SEQ ID NO: 274145 - protein, 15 aa, Artificial Sequence
  Description of Artificial Sequence: Synthetic peptide
  Seed: SIGKVCRTLLAKSVF
SIWKVERTLLSKSVF

SEQ ID NO: 274146 - protein, 15 aa, Artificial Sequence
  Description of Artificial Sequence: Synthetic peptide
  Seed: SIGKVCRTLLAKSVF
SIWKVFRHLLAKSVF

SEQ ID NO: 274147 - protein, 15 aa, Artificial Sequence
  Description of Artificial Sequence: Synthetic peptide
  Seed: SIGKVCRTLLAKSVF
SIWKVFRHLLHKSVF

SEQ ID NO: 274148 - protein, 15 aa, Artificial Sequence
  Description of Artificial Sequence: Synthetic peptide
  Seed: SIGKVCRTLLAKSVF
SIWKVFRHLLRKSVF

SEQ ID NO: 274149 - protein, 15 aa, Artificial Sequence
  Description of Artificial Sequence: Synthetic peptide
  Seed: SIGKVCRTLLAKSVF
SIWKVFRHLLSKSVF

SEQ ID NO: 274150 - protein, 15 aa, Artificial Sequence
  Description of Artificial Sequence: Synthetic peptide
  Seed: SIGKVCRTLLAKSVF
SIWKVFRKLLAKSVF

SEQ ID NO: 274151 - protein, 15 aa, Artificial Sequence
  Description of Artificial Sequence: Synthetic peptide
  Seed: SIGKVCRTLLAKSVF
SIWKVFRKLLGKSVF

SEQ ID NO: 274152 - protein, 15 aa, Artificial Sequence
  Description of Artificial Sequence: Synthetic peptide
  Seed: SIGKVCRTLLAKSVF
SIWKVFRKLLHKSVF

SEQ ID NO: 274153 - protein, 15 aa, Artificial Sequence
  Description of Artificial Sequence: Synthetic peptide
  Seed: SIGKVCRTLLAKSVF
SIWKVFRKLLKKSVF

SEQ ID NO: 274154 - protein, 15 aa, Artificial Sequence
  Description of Artificial Sequence: Synthetic peptide
  Seed: SIGKVCRTLLAKSVF
SIWKVFRKLLNKSVF

SEQ ID NO: 274155 - protein, 15 aa, Artificial Sequence
  Description of Artificial Sequence: Synthetic peptide
  Seed: SIGKVCRTLLAKSVF
SIWKVFRKLLPKSVF

SEQ ID NO: 274156 - protein, 15 aa, Artificial Sequence
  Description of Artificial Sequence: Synthetic peptide
  Seed: SIGKVCRTLLAKSVF
SIWKVFRKLLQKSVF

SEQ ID NO: 274157 - protein, 15 aa, Artificial Sequence
  Description of Artificial Sequence: Synthetic peptide
  Seed: SIGKVCRTLLAKSVF
SIWKVFRKLLRKSVF

SEQ ID NO: 274158 - protein, 15 aa, Artificial Sequence
  Description of Artificial Sequence: Synthetic peptide
  Seed: SIGKVCRTLLAKSVF
SIWKVFRKLLSKSVF

SEQ ID NO: 274159 - protein, 15 aa, Artificial Sequence
  Description of Artificial Sequence: Synthetic peptide
  Seed: SIGKVCRTLLAKSVF
SIWKVFRKLLTKSVF

SEQ ID NO: 274160 - protein, 15 aa, Artificial Sequence
  Description of Artificial Sequence: Synthetic peptide
  Seed: SIGKVCRTLLAKSVF
SIWKVFRNLLDKSVF

SEQ ID NO: 274161 - protein, 15 aa, Artificial Sequence
  Description of Artificial Sequence: Synthetic peptide
  Seed: SIGKVCRTLLAKSVF
SIWKVFRRLLAKSVF

SEQ ID NO: 274162 - protein, 15 aa, Artificial Sequence
  Description of Artificial Sequence: Synthetic peptide
  Seed: SIGKVCRTLLAKSVF
SIWKVFRRLLEKSVF

SEQ ID NO: 274163 - protein, 15 aa, Artificial Sequence
  Description of Artificial Sequence: Synthetic peptide
  Seed: SIGKVCRTLLAKSVF
SIWKVFRRLLGKSVF

SEQ ID NO: 274164 - protein, 15 aa, Artificial Sequence
  Description of Artificial Sequence: Synthetic peptide
  Seed: SIGKVCRTLLAKSVF
SIWKVFRRLLHKSVF

SEQ ID NO: 274165 - protein, 15 aa, Artificial Sequence
  Description of Artificial Sequence: Synthetic peptide
  Seed: SIGKVCRTLLAKSVF
SIWKVFRRLLKKSVF

SEQ ID NO: 274166 - protein, 15 aa, Artificial Sequence
  Description of Artificial Sequence: Synthetic peptide
  Seed: SIGKVCRTLLAKSVF
SIWKVFRRLLMKSVF

SEQ ID NO: 274167 - protein, 15 aa, Artificial Sequence
  Description of Artificial Sequence: Synthetic peptide
  Seed: SIGKVCRTLLAKSVF
SIWKVFRRLLNKSVF

SEQ ID NO: 274168 - protein, 15 aa, Artificial Sequence
  Description of Artificial Sequence: Synthetic peptide
  Seed: SIGKVCRTLLAKSVF
SIWKVFRRLLPKSVF

SEQ ID NO: 274169 - protein, 15 aa, Artificial Sequence
  Description of Artificial Sequence: Synthetic peptide
  Seed: SIGKVCRTLLAKSVF
SIWKVFRRLLQKSVF

SEQ ID NO: 274170 - protein, 15 aa, Artificial Sequence
  Description of Artificial Sequence: Synthetic peptide
  Seed: SIGKVCRTLLAKSVF
SIWKVFRRLLRKSVF

SEQ ID NO: 274171 - protein, 15 aa, Artificial Sequence
  Description of Artificial Sequence: Synthetic peptide
  Seed: SIGKVCRTLLAKSVF
SIWKVFRRLLSKSVF

SEQ ID NO: 274172 - protein, 15 aa, Artificial Sequence
  Description of Artificial Sequence: Synthetic peptide
  Seed: SIGKVCRTLLAKSVF
SIWKVFRRLLTKSVF

SEQ ID NO: 274173 - protein, 15 aa, Artificial Sequence
  Description of Artificial Sequence: Synthetic peptide
  Seed: SIGKVCRTLLAKSVF
SIWKVFRRLLVKSVF

SEQ ID NO: 274174 - protein, 15 aa, Artificial Sequence
  Description of Artificial Sequence: Synthetic peptide
  Seed: SIGKVCRTLLAKSVF
SIWKVFRRLLYKSVF

SEQ ID NO: 274175 - protein, 15 aa, Artificial Sequence
  Description of Artificial Sequence: Synthetic peptide
  Seed: SIGKVCRTLLAKSVF
SIWKVFRSLLDKSVF

SEQ ID NO: 274176 - protein, 15 aa, Artificial Sequence
  Description of Artificial Sequence: Synthetic peptide
  Seed: SIGKVCRTLLAKSVF
SIWKVFRTLLDKSVF

SEQ ID NO: 274177 - protein, 15 aa, Artificial Sequence
  Description of Artificial Sequence: Synthetic peptide
  Seed: SIGKVCRTLLAKSVF
SIWKVFRTLLRKSVF

SEQ ID NO: 274178 - protein, 15 aa, Artificial Sequence
  Description of Artificial Sequence: Synthetic peptide
  Seed: SIGKVCRTLLAKSVF
SIWKVFRTLLSKSVF

SEQ ID NO: 274179 - protein, 15 aa, Artificial Sequence
  Description of Artificial Sequence: Synthetic peptide
  Seed: SIGKVCRTLLAKSVF
SIWKVGRKLLAKSVF

SEQ ID NO: 274180 - protein, 15 aa, Artificial Sequence
  Description of Artificial Sequence: Synthetic peptide
  Seed: SIGKVCRTLLAKSVF
SIWKVGRKLLGKSVF

SEQ ID NO: 274181 - protein, 15 aa, Artificial Sequence
  Description of Artificial Sequence: Synthetic peptide
  Seed: SIGKVCRTLLAKSVF
SIWKVGRKLLQKSVF

SEQ ID NO: 274182 - protein, 15 aa, Artificial Sequence
  Description of Artificial Sequence: Synthetic peptide
  Seed: SIGKVCRTLLAKSVF
SIWKVGRKLLSKSVF

SEQ ID NO: 274183 - protein, 15 aa, Artificial Sequence
  Description of Artificial Sequence: Synthetic peptide
  Seed: SIGKVCRTLLAKSVF
SIWKVGRRLLAKSVF

SEQ ID NO: 274184 - protein, 15 aa, Artificial Sequence
  Description of Artificial Sequence: Synthetic peptide
  Seed: SIGKVCRTLLAKSVF
SIWKVGRRLLGKSVF

SEQ ID NO: 274185 - protein, 15 aa, Artificial Sequence
  Description of Artificial Sequence: Synthetic peptide
  Seed: SIGKVCRTLLAKSVF
SIWKVGRRLLHKSVF

SEQ ID NO: 274186 - protein, 15 aa, Artificial Sequence
  Description of Artificial Sequence: Synthetic peptide
  Seed: SIGKVCRTLLAKSVF
SIWKVGRRLLLKSVF

SEQ ID NO: 274187 - protein, 15 aa, Artificial Sequence
  Description of Artificial Sequence: Synthetic peptide
  Seed: SIGKVCRTLLAKSVF
SIWKVGRRLLMKSVF

SEQ ID NO: 274188 - protein, 15 aa, Artificial Sequence
  Description of Artificial Sequence: Synthetic peptide
  Seed: SIGKVCRTLLAKSVF
SIWKVGRRLLNKSVF

SEQ ID NO: 274189 - protein, 15 aa, Artificial Sequence
  Description of Artificial Sequence: Synthetic peptide
  Seed: SIGKVCRTLLAKSVF
SIWKVGRRLLQKSVF

SEQ ID NO: 274190 - protein, 15 aa, Artificial Sequence
  Description of Artificial Sequence: Synthetic peptide
  Seed: SIGKVCRTLLAKSVF
SIWKVGRRLLSKSVF

SEQ ID NO: 274191 - protein, 15 aa, Artificial Sequence
  Description of Artificial Sequence: Synthetic peptide
  Seed: SIGKVCRTLLAKSVF
SIWKVGRRLLVKSVF

SEQ ID NO: 274192 - protein, 15 aa, Artificial Sequence
  Description of Artificial Sequence: Synthetic peptide
  Seed: SIGKVCRTLLAKSVF
SIWKVGRRLLYKSVF

SEQ ID NO: 274193 - protein, 15 aa, Artificial Sequence
  Description of Artificial Sequence: Synthetic peptide
  Seed: SIGKVCRTLLAKSVF
SIWKVHRKLLAKSVF

SEQ ID NO: 274194 - protein, 15 aa, Artificial Sequence
  Description of Artificial Sequence: Synthetic peptide
  Seed: SIGKVCRTLLAKSVF
SIWKVHRKLLGKSVF

SEQ ID NO: 274195 - protein, 15 aa, Artificial Sequence
  Description of Artificial Sequence: Synthetic peptide
  Seed: SIGKVCRTLLAKSVF
SIWKVHRKLLHKSVF

SEQ ID NO: 274196 - protein, 15 aa, Artificial Sequence
  Description of Artificial Sequence: Synthetic peptide
  Seed: SIGKVCRTLLAKSVF
SIWKVHRKLLMKSVF

SEQ ID NO: 274197 - protein, 15 aa, Artificial Sequence
  Description of Artificial Sequence: Synthetic peptide
  Seed: SIGKVCRTLLAKSVF
SIWKVHRKLLQKSVF

SEQ ID NO: 274198 - protein, 15 aa, Artificial Sequence
  Description of Artificial Sequence: Synthetic peptide
  Seed: SIGKVCRTLLAKSVF
SIWKVHRKLLRKSVF

SEQ ID NO: 274199 - protein, 15 aa, Artificial Sequence
  Description of Artificial Sequence: Synthetic peptide
  Seed: SIGKVCRTLLAKSVF
SIWKVHRKLLSKSVF

SEQ ID NO: 274200 - protein, 15 aa, Artificial Sequence
  Description of Artificial Sequence: Synthetic peptide
  Seed: SIGKVCRTLLAKSVF
SIWKVHRKLLTKSVF

SEQ ID NO: 274201 - protein, 15 aa, Artificial Sequence
  Description of Artificial Sequence: Synthetic peptide
  Seed: SIGKVCRTLLAKSVF
SIWKVHRKLLVKSVF

SEQ ID NO: 274202 - protein, 15 aa, Artificial Sequence
  Description of Artificial Sequence: Synthetic peptide
  Seed: SIGKVCRTLLAKSVF
SIWKVHRKLLYKSVF

SEQ ID NO: 274203 - protein, 15 aa, Artificial Sequence
  Description of Artificial Sequence: Synthetic peptide
  Seed: SIGKVCRTLLAKSVF
SIWKVHRRLLAKSVF

SEQ ID NO: 274204 - protein, 15 aa, Artificial Sequence
  Description of Artificial Sequence: Synthetic peptide
  Seed: SIGKVCRTLLAKSVF
SIWKVHRRLLEKSVF

SEQ ID NO: 274205 - protein, 15 aa, Artificial Sequence
  Description of Artificial Sequence: Synthetic peptide
  Seed: SIGKVCRTLLAKSVF
SIWKVHRRLLFKSVF

SEQ ID NO: 274206 - protein, 15 aa, Artificial Sequence
  Description of Artificial Sequence: Synthetic peptide
  Seed: SIGKVCRTLLAKSVF
SIWKVHRRLLGKSVF

SEQ ID NO: 274207 - protein, 15 aa, Artificial Sequence
  Description of Artificial Sequence: Synthetic peptide
  Seed: SIGKVCRTLLAKSVF
SIWKVHRRLLHKSVF

SEQ ID NO: 274208 - protein, 15 aa, Artificial Sequence
  Description of Artificial Sequence: Synthetic peptide
  Seed: SIGKVCRTLLAKSVF
SIWKVHRRLLIKSVF

SEQ ID NO: 274209 - protein, 15 aa, Artificial Sequence
  Description of Artificial Sequence: Synthetic peptide
  Seed: SIGKVCRTLLAKSVF
SIWKVHRRLLLKSVF

SEQ ID NO: 274210 - protein, 15 aa, Artificial Sequence
  Description of Artificial Sequence: Synthetic peptide
  Seed: SIGKVCRTLLAKSVF
SIWKVHRRLLMKSVF

SEQ ID NO: 274211 - protein, 15 aa, Artificial Sequence
  Description of Artificial Sequence: Synthetic peptide
  Seed: SIGKVCRTLLAKSVF
SIWKVHRRLLNKSVF

SEQ ID NO: 274212 - protein, 15 aa, Artificial Sequence
  Description of Artificial Sequence: Synthetic peptide
  Seed: SIGKVCRTLLAKSVF
SIWKVHRRLLQKSVF

SEQ ID NO: 274213 - protein, 15 aa, Artificial Sequence
  Description of Artificial Sequence: Synthetic peptide
  Seed: SIGKVCRTLLAKSVF
SIWKVHRRLLRKSVF

SEQ ID NO: 274214 - protein, 15 aa, Artificial Sequence
  Description of Artificial Sequence: Synthetic peptide
  Seed: SIGKVCRTLLAKSVF
SIWKVHRRLLSKSVF

SEQ ID NO: 274215 - protein, 15 aa, Artificial Sequence
  Description of Artificial Sequence: Synthetic peptide
  Seed: SIGKVCRTLLAKSVF
SIWKVHRRLLTKSVF

SEQ ID NO: 274216 - protein, 15 aa, Artificial Sequence
  Description of Artificial Sequence: Synthetic peptide
  Seed: SIGKVCRTLLAKSVF
SIWKVHRRLLVKSVF

SEQ ID NO: 274217 - protein, 15 aa, Artificial Sequence
  Description of Artificial Sequence: Synthetic peptide
  Seed: SIGKVCRTLLAKSVF
SIWKVHRRLLYKSVF

SEQ ID NO: 274218 - protein, 15 aa, Artificial Sequence
  Description of Artificial Sequence: Synthetic peptide
  Seed: SIGKVCRTLLAKSVF
SIWKVHRSLLRKSVF

SEQ ID NO: 274219 - protein, 15 aa, Artificial Sequence
  Description of Artificial Sequence: Synthetic peptide
  Seed: SIGKVCRTLLAKSVF
SIWKVHRTLLRKSVF

SEQ ID NO: 274220 - protein, 15 aa, Artificial Sequence
  Description of Artificial Sequence: Synthetic peptide
  Seed: SIGKVCRTLLAKSVF
SIWKVHRVLLRKSVF

SEQ ID NO: 274221 - protein, 15 aa, Artificial Sequence
  Description of Artificial Sequence: Synthetic peptide
  Seed: SIGKVCRTLLAKSVF
SIWKVIRALLAKSVF

SEQ ID NO: 274222 - protein, 15 aa, Artificial Sequence
  Description of Artificial Sequence: Synthetic peptide
  Seed: SIGKVCRTLLAKSVF
SIWKVIRALLDKSVF

SEQ ID NO: 274223 - protein, 15 aa, Artificial Sequence
  Description of Artificial Sequence: Synthetic peptide
  Seed: SIGKVCRTLLAKSVF
SIWKVIRALLHKSVF

SEQ ID NO: 274224 - protein, 15 aa, Artificial Sequence
  Description of Artificial Sequence: Synthetic peptide
  Seed: SIGKVCRTLLAKSVF
SIWKVIRALLSKSVF

SEQ ID NO: 274225 - protein, 15 aa, Artificial Sequence
  Description of Artificial Sequence: Synthetic peptide
  Seed: SIGKVCRTLLAKSVF
SIWKVIRGLLSKSVF

SEQ ID NO: 274226 - protein, 15 aa, Artificial Sequence
  Description of Artificial Sequence: Synthetic peptide
  Seed: SIGKVCRTLLAKSVF
SIWKVIRHLLAKSVF

SEQ ID NO: 274227 - protein, 15 aa, Artificial Sequence
  Description of Artificial Sequence: Synthetic peptide
  Seed: SIGKVCRTLLAKSVF
SIWKVIRHLLGKSVF

SEQ ID NO: 274228 - protein, 15 aa, Artificial Sequence
  Description of Artificial Sequence: Synthetic peptide
  Seed: SIGKVCRTLLAKSVF
SIWKVIRHLLHKSVF

SEQ ID NO: 274229 - protein, 15 aa, Artificial Sequence
  Description of Artificial Sequence: Synthetic peptide
  Seed: SIGKVCRTLLAKSVF
SIWKVIRHLLKKSVF

SEQ ID NO: 274230 - protein, 15 aa, Artificial Sequence
  Description of Artificial Sequence: Synthetic peptide
  Seed: SIGKVCRTLLAKSVF
SIWKVIRHLLNKSVF

SEQ ID NO: 274231 - protein, 15 aa, Artificial Sequence
  Description of Artificial Sequence: Synthetic peptide
  Seed: SIGKVCRTLLAKSVF
SIWKVIRHLLPKSVF

SEQ ID NO: 274232 - protein, 15 aa, Artificial Sequence
  Description of Artificial Sequence: Synthetic peptide
  Seed: SIGKVCRTLLAKSVF
SIWKVIRHLLQKSVF

SEQ ID NO: 274233 - protein, 15 aa, Artificial Sequence
  Description of Artificial Sequence: Synthetic peptide
  Seed: SIGKVCRTLLAKSVF
SIWKVIRHLLRKSVF

SEQ ID NO: 274234 - protein, 15 aa, Artificial Sequence
  Description of Artificial Sequence: Synthetic peptide
  Seed: SIGKVCRTLLAKSVF
SIWKVIRHLLSKSVF

SEQ ID NO: 274235 - protein, 15 aa, Artificial Sequence
  Description of Artificial Sequence: Synthetic peptide
  Seed: SIGKVCRTLLAKSVF
SIWKVIRHLLTKSVF

SEQ ID NO: 274236 - protein, 15 aa, Artificial Sequence
  Description of Artificial Sequence: Synthetic peptide
  Seed: SIGKVCRTLLAKSVF
SIWKVIRKLLAKSVF

SEQ ID NO: 274237 - protein, 15 aa, Artificial Sequence
  Description of Artificial Sequence: Synthetic peptide
  Seed: SIGKVCRTLLAKSVF
SIWKVIRKLLDKSVF

SEQ ID NO: 274238 - protein, 15 aa, Artificial Sequence
  Description of Artificial Sequence: Synthetic peptide
  Seed: SIGKVCRTLLAKSVF
SIWKVIRKLLEKSVF

SEQ ID NO: 274239 - protein, 15 aa, Artificial Sequence
  Description of Artificial Sequence: Synthetic peptide
  Seed: SIGKVCRTLLAKSVF
SIWKVIRKLLGKSVF

SEQ ID NO: 274240 - protein, 15 aa, Artificial Sequence
  Description of Artificial Sequence: Synthetic peptide
  Seed: SIGKVCRTLLAKSVF
SIWKVIRKLLHKSVF

SEQ ID NO: 274241 - protein, 15 aa, Artificial Sequence
  Description of Artificial Sequence: Synthetic peptide
  Seed: SIGKVCRTLLAKSVF
SIWKVIRKLLIKSVF

SEQ ID NO: 274242 - protein, 15 aa, Artificial Sequence
  Description of Artificial Sequence: Synthetic peptide
  Seed: SIGKVCRTLLAKSVF
SIWKVIRKLLKKSVF

SEQ ID NO: 274243 - protein, 15 aa, Artificial Sequence
  Description of Artificial Sequence: Synthetic peptide
  Seed: SIGKVCRTLLAKSVF
SIWKVIRKLLLKSVF

SEQ ID NO: 274244 - protein, 15 aa, Artificial Sequence
  Description of Artificial Sequence: Synthetic peptide
  Seed: SIGKVCRTLLAKSVF
SIWKVIRKLLMKSVF

SEQ ID NO: 274245 - protein, 15 aa, Artificial Sequence
  Description of Artificial Sequence: Synthetic peptide
  Seed: SIGKVCRTLLAKSVF
SIWKVIRKLLNKSVF

SEQ ID NO: 274246 - protein, 15 aa, Artificial Sequence
  Description of Artificial Sequence: Synthetic peptide
  Seed: SIGKVCRTLLAKSVF
SIWKVIRKLLPKSVF

SEQ ID NO: 274247 - protein, 15 aa, Artificial Sequence
  Description of Artificial Sequence: Synthetic peptide
  Seed: SIGKVCRTLLAKSVF
SIWKVIRKLLQKSVF

SEQ ID NO: 274248 - protein, 15 aa, Artificial Sequence
  Description of Artificial Sequence: Synthetic peptide
  Seed: SIGKVCRTLLAKSVF
SIWKVIRKLLRKSVF

SEQ ID NO: 274249 - protein, 15 aa, Artificial Sequence
  Description of Artificial Sequence: Synthetic peptide
  Seed: SIGKVCRTLLAKSVF
SIWKVIRKLLSKSVF

SEQ ID NO: 274250 - protein, 15 aa, Artificial Sequence
  Description of Artificial Sequence: Synthetic peptide
  Seed: SIGKVCRTLLAKSVF
SIWKVIRKLLTKSVF

SEQ ID NO: 274251 - protein, 15 aa, Artificial Sequence
  Description of Artificial Sequence: Synthetic peptide
  Seed: SIGKVCRTLLAKSVF
SIWKVIRKLLVKSVF

SEQ ID NO: 274252 - protein, 15 aa, Artificial Sequence
  Description of Artificial Sequence: Synthetic peptide
  Seed: SIGKVCRTLLAKSVF
SIWKVIRKLLYKSVF

SEQ ID NO: 274253 - protein, 15 aa, Artificial Sequence
  Description of Artificial Sequence: Synthetic peptide
  Seed: SIGKVCRTLLAKSVF
SIWKVIRNLLAKSVF

SEQ ID NO: 274254 - protein, 15 aa, Artificial Sequence
  Description of Artificial Sequence: Synthetic peptide
  Seed: SIGKVCRTLLAKSVF
SIWKVIRNLLDKSVF

SEQ ID NO: 274255 - protein, 15 aa, Artificial Sequence
  Description of Artificial Sequence: Synthetic peptide
  Seed: SIGKVCRTLLAKSVF
SIWKVIRNLLEKSVF

SEQ ID NO: 274256 - protein, 15 aa, Artificial Sequence
  Description of Artificial Sequence: Synthetic peptide
  Seed: SIGKVCRTLLAKSVF
SIWKVIRNLLGKSVF

SEQ ID NO: 274257 - protein, 15 aa, Artificial Sequence
  Description of Artificial Sequence: Synthetic peptide
  Seed: SIGKVCRTLLAKSVF
SIWKVIRNLLHKSVF

SEQ ID NO: 274258 - protein, 15 aa, Artificial Sequence
  Description of Artificial Sequence: Synthetic peptide
  Seed: SIGKVCRTLLAKSVF
SIWKVIRNLLKKSVF

SEQ ID NO: 274259 - protein, 15 aa, Artificial Sequence
  Description of Artificial Sequence: Synthetic peptide
  Seed: SIGKVCRTLLAKSVF
SIWKVIRNLLRKSVF

SEQ ID NO: 274260 - protein, 15 aa, Artificial Sequence
  Description of Artificial Sequence: Synthetic peptide
  Seed: SIGKVCRTLLAKSVF
SIWKVIRNLLSKSVF

SEQ ID NO: 274261 - protein, 15 aa, Artificial Sequence
  Description of Artificial Sequence: Synthetic peptide
  Seed: SIGKVCRTLLAKSVF
SIWKVIRPLLAKSVF

SEQ ID NO: 274262 - protein, 15 aa, Artificial Sequence
  Description of Artificial Sequence: Synthetic peptide
  Seed: SIGKVCRTLLAKSVF
SIWKVIRPLLGKSVF

SEQ ID NO: 274263 - protein, 15 aa, Artificial Sequence
  Description of Artificial Sequence: Synthetic peptide
  Seed: SIGKVCRTLLAKSVF
SIWKVIRPLLHKSVF

SEQ ID NO: 274264 - protein, 15 aa, Artificial Sequence
  Description of Artificial Sequence: Synthetic peptide
  Seed: SIGKVCRTLLAKSVF
SIWKVIRPLLNKSVF

SEQ ID NO: 274265 - protein, 15 aa, Artificial Sequence
  Description of Artificial Sequence: Synthetic peptide
  Seed: SIGKVCRTLLAKSVF
SIWKVIRPLLQKSVF

SEQ ID NO: 274266 - protein, 15 aa, Artificial Sequence
  Description of Artificial Sequence: Synthetic peptide
  Seed: SIGKVCRTLLAKSVF
SIWKVIRPLLSKSVF

SEQ ID NO: 274267 - protein, 15 aa, Artificial Sequence
  Description of Artificial Sequence: Synthetic peptide
  Seed: SIGKVCRTLLAKSVF
SIWKVIRPLLTKSVF

SEQ ID NO: 274268 - protein, 15 aa, Artificial Sequence
  Description of Artificial Sequence: Synthetic peptide
  Seed: SIGKVCRTLLAKSVF
SIWKVIRRLLAKSVF

SEQ ID NO: 274269 - protein, 15 aa, Artificial Sequence
  Description of Artificial Sequence: Synthetic peptide
  Seed: SIGKVCRTLLAKSVF
SIWKVIRRLLDKSVF

SEQ ID NO: 274270 - protein, 15 aa, Artificial Sequence
  Description of Artificial Sequence: Synthetic peptide
  Seed: SIGKVCRTLLAKSVF
SIWKVIRRLLEKSVF

SEQ ID NO: 274271 - protein, 15 aa, Artificial Sequence
  Description of Artificial Sequence: Synthetic peptide
  Seed: SIGKVCRTLLAKSVF
SIWKVIRRLLGKSVF

SEQ ID NO: 274272 - protein, 15 aa, Artificial Sequence
  Description of Artificial Sequence: Synthetic peptide
  Seed: SIGKVCRTLLAKSVF
SIWKVIRRLLHKSVF

SEQ ID NO: 274273 - protein, 15 aa, Artificial Sequence
  Description of Artificial Sequence: Synthetic peptide
  Seed: SIGKVCRTLLAKSVF
SIWKVIRRLLIKSVF

SEQ ID NO: 274274 - protein, 15 aa, Artificial Sequence
  Description of Artificial Sequence: Synthetic peptide
  Seed: SIGKVCRTLLAKSVF
SIWKVIRRLLKKSVF

SEQ ID NO: 274275 - protein, 15 aa, Artificial Sequence
  Description of Artificial Sequence: Synthetic peptide
  Seed: SIGKVCRTLLAKSVF
SIWKVIRRLLLKSVF

SEQ ID NO: 274276 - protein, 15 aa, Artificial Sequence
  Description of Artificial Sequence: Synthetic peptide
  Seed: SIGKVCRTLLAKSVF
SIWKVIRRLLMKSVF

SEQ ID NO: 274277 - protein, 15 aa, Artificial Sequence
  Description of Artificial Sequence: Synthetic peptide
  Seed: SIGKVCRTLLAKSVF
SIWKVIRRLLNKSVF

SEQ ID NO: 274278 - protein, 15 aa, Artificial Sequence
  Description of Artificial Sequence: Synthetic peptide
  Seed: SIGKVCRTLLAKSVF
SIWKVIRRLLPKSVF

SEQ ID NO: 274279 - protein, 15 aa, Artificial Sequence
  Description of Artificial Sequence: Synthetic peptide
  Seed: SIGKVCRTLLAKSVF
SIWKVIRRLLQKSVF

SEQ ID NO: 274280 - protein, 15 aa, Artificial Sequence
  Description of Artificial Sequence: Synthetic peptide
  Seed: SIGKVCRTLLAKSVF
SIWKVIRRLLRKSVF

SEQ ID NO: 274281 - protein, 15 aa, Artificial Sequence
  Description of Artificial Sequence: Synthetic peptide
  Seed: SIGKVCRTLLAKSVF
SIWKVIRRLLSKSVF

SEQ ID NO: 274282 - protein, 15 aa, Artificial Sequence
  Description of Artificial Sequence: Synthetic peptide
  Seed: SIGKVCRTLLAKSVF
SIWKVIRRLLTKSVF

SEQ ID NO: 274283 - protein, 15 aa, Artificial Sequence
  Description of Artificial Sequence: Synthetic peptide
  Seed: SIGKVCRTLLAKSVF
SIWKVIRRLLVKSVF

SEQ ID NO: 274284 - protein, 15 aa, Artificial Sequence
  Description of Artificial Sequence: Synthetic peptide
  Seed: SIGKVCRTLLAKSVF
SIWKVIRRLLYKSVF

SEQ ID NO: 274285 - protein, 15 aa, Artificial Sequence
  Description of Artificial Sequence: Synthetic peptide
  Seed: SIGKVCRTLLAKSVF
SIWKVIRSLLAKSVF

SEQ ID NO: 274286 - protein, 15 aa, Artificial Sequence
  Description of Artificial Sequence: Synthetic peptide
  Seed: SIGKVCRTLLAKSVF
SIWKVIRSLLDKSVF

SEQ ID NO: 274287 - protein, 15 aa, Artificial Sequence
  Description of Artificial Sequence: Synthetic peptide
  Seed: SIGKVCRTLLAKSVF
SIWKVIRSLLEKSVF

SEQ ID NO: 274288 - protein, 15 aa, Artificial Sequence
  Description of Artificial Sequence: Synthetic peptide
  Seed: SIGKVCRTLLAKSVF
SIWKVIRSLLGKSVF

SEQ ID NO: 274289 - protein, 15 aa, Artificial Sequence
  Description of Artificial Sequence: Synthetic peptide
  Seed: SIGKVCRTLLAKSVF
SIWKVIRSLLHKSVF

SEQ ID NO: 274290 - protein, 15 aa, Artificial Sequence
  Description of Artificial Sequence: Synthetic peptide
  Seed: SIGKVCRTLLAKSVF
SIWKVIRSLLKKSVF

SEQ ID NO: 274291 - protein, 15 aa, Artificial Sequence
  Description of Artificial Sequence: Synthetic peptide
  Seed: SIGKVCRTLLAKSVF
SIWKVIRSLLNKSVF

SEQ ID NO: 274292 - protein, 15 aa, Artificial Sequence
  Description of Artificial Sequence: Synthetic peptide
  Seed: SIGKVCRTLLAKSVF
SIWKVIRSLLSKSVF

SEQ ID NO: 274293 - protein, 15 aa, Artificial Sequence
  Description of Artificial Sequence: Synthetic peptide
  Seed: SIGKVCRTLLAKSVF
SIWKVIRTLLAKSVF

SEQ ID NO: 274294 - protein, 15 aa, Artificial Sequence
  Description of Artificial Sequence: Synthetic peptide
  Seed: SIGKVCRTLLAKSVF
SIWKVIRTLLDKSVF

SEQ ID NO: 274295 - protein, 15 aa, Artificial Sequence
  Description of Artificial Sequence: Synthetic peptide
  Seed: SIGKVCRTLLAKSVF
SIWKVIRTLLEKSVF

SEQ ID NO: 274296 - protein, 15 aa, Artificial Sequence
  Description of Artificial Sequence: Synthetic peptide
  Seed: SIGKVCRTLLAKSVF
SIWKVIRTLLGKSVF

SEQ ID NO: 274297 - protein, 15 aa, Artificial Sequence
  Description of Artificial Sequence: Synthetic peptide
  Seed: SIGKVCRTLLAKSVF
SIWKVIRTLLHKSVF

SEQ ID NO: 274298 - protein, 15 aa, Artificial Sequence
  Description of Artificial Sequence: Synthetic peptide
  Seed: SIGKVCRTLLAKSVF
SIWKVIRTLLKKSVF

SEQ ID NO: 274299 - protein, 15 aa, Artificial Sequence
  Description of Artificial Sequence: Synthetic peptide
  Seed: SIGKVCRTLLAKSVF
SIWKVIRTLLNKSVF

SEQ ID NO: 274300 - protein, 15 aa, Artificial Sequence
  Description of Artificial Sequence: Synthetic peptide
  Seed: SIGKVCRTLLAKSVF
SIWKVIRTLLRKSVF

SEQ ID NO: 274301 - protein, 15 aa, Artificial Sequence
  Description of Artificial Sequence: Synthetic peptide
  Seed: SIGKVCRTLLAKSVF
SIWKVIRTLLSKSVF

SEQ ID NO: 274302 - protein, 15 aa, Artificial Sequence
  Description of Artificial Sequence: Synthetic peptide
  Seed: SIGKVCRTLLAKSVF
SIWKVKRALLRKSVF

SEQ ID NO: 274303 - protein, 15 aa, Artificial Sequence
  Description of Artificial Sequence: Synthetic peptide
  Seed: SIGKVCRTLLAKSVF
SIWKVKRHLLGKSVF

SEQ ID NO: 274304 - protein, 15 aa, Artificial Sequence
  Description of Artificial Sequence: Synthetic peptide
  Seed: SIGKVCRTLLAKSVF
SIWKVKRKLLAKSVF

SEQ ID NO: 274305 - protein, 15 aa, Artificial Sequence
  Description of Artificial Sequence: Synthetic peptide
  Seed: SIGKVCRTLLAKSVF
SIWKVKRKLLGKSVF

SEQ ID NO: 274306 - protein, 15 aa, Artificial Sequence
  Description of Artificial Sequence: Synthetic peptide
  Seed: SIGKVCRTLLAKSVF
SIWKVKRKLLHKSVF

SEQ ID NO: 274307 - protein, 15 aa, Artificial Sequence
  Description of Artificial Sequence: Synthetic peptide
  Seed: SIGKVCRTLLAKSVF
SIWKVKRKLLIKSVF

SEQ ID NO: 274308 - protein, 15 aa, Artificial Sequence
  Description of Artificial Sequence: Synthetic peptide
  Seed: SIGKVCRTLLAKSVF
SIWKVKRKLLLKSVF

SEQ ID NO: 274309 - protein, 15 aa, Artificial Sequence
  Description of Artificial Sequence: Synthetic peptide
  Seed: SIGKVCRTLLAKSVF
SIWKVKRKLLMKSVF

SEQ ID NO: 274310 - protein, 15 aa, Artificial Sequence
  Description of Artificial Sequence: Synthetic peptide
  Seed: SIGKVCRTLLAKSVF
SIWKVKRKLLNKSVF

SEQ ID NO: 274311 - protein, 15 aa, Artificial Sequence
  Description of Artificial Sequence: Synthetic peptide
  Seed: SIGKVCRTLLAKSVF
SIWKVKRKLLQKSVF

SEQ ID NO: 274312 - protein, 15 aa, Artificial Sequence
  Description of Artificial Sequence: Synthetic peptide
  Seed: SIGKVCRTLLAKSVF
SIWKVKRKLLSKSVF

SEQ ID NO: 274313 - protein, 15 aa, Artificial Sequence
  Description of Artificial Sequence: Synthetic peptide
  Seed: SIGKVCRTLLAKSVF
SIWKVKRKLLTKSVF

SEQ ID NO: 274314 - protein, 15 aa, Artificial Sequence
  Description of Artificial Sequence: Synthetic peptide
  Seed: SIGKVCRTLLAKSVF
SIWKVKRKLLVKSVF

SEQ ID NO: 274315 - protein, 15 aa, Artificial Sequence
  Description of Artificial Sequence: Synthetic peptide
  Seed: SIGKVCRTLLAKSVF
SIWKVKRKLLYKSVF

SEQ ID NO: 274316 - protein, 15 aa, Artificial Sequence
  Description of Artificial Sequence: Synthetic peptide
  Seed: SIGKVCRTLLAKSVF
SIWKVKRRLLAKSVF

SEQ ID NO: 274317 - protein, 15 aa, Artificial Sequence
  Description of Artificial Sequence: Synthetic peptide
  Seed: SIGKVCRTLLAKSVF
SIWKVKRRLLCKSVF

SEQ ID NO: 274318 - protein, 15 aa, Artificial Sequence
  Description of Artificial Sequence: Synthetic peptide
  Seed: SIGKVCRTLLAKSVF
SIWKVKRRLLDKSVF

SEQ ID NO: 274319 - protein, 15 aa, Artificial Sequence
  Description of Artificial Sequence: Synthetic peptide
  Seed: SIGKVCRTLLAKSVF
SIWKVKRRLLEKSVF

SEQ ID NO: 274320 - protein, 15 aa, Artificial Sequence
  Description of Artificial Sequence: Synthetic peptide
  Seed: SIGKVCRTLLAKSVF
SIWKVKRRLLGKSVF

SEQ ID NO: 274321 - protein, 15 aa, Artificial Sequence
  Description of Artificial Sequence: Synthetic peptide
  Seed: SIGKVCRTLLAKSVF
SIWKVKRRLLHKSVF

SEQ ID NO: 274322 - protein, 15 aa, Artificial Sequence
  Description of Artificial Sequence: Synthetic peptide
  Seed: SIGKVCRTLLAKSVF
SIWKVKRRLLLKSVF

SEQ ID NO: 274323 - protein, 15 aa, Artificial Sequence
  Description of Artificial Sequence: Synthetic peptide
  Seed: SIGKVCRTLLAKSVF
SIWKVKRRLLMKSVF

SEQ ID NO: 274324 - protein, 15 aa, Artificial Sequence
  Description of Artificial Sequence: Synthetic peptide
  Seed: SIGKVCRTLLAKSVF
SIWKVKRRLLQKSVF

SEQ ID NO: 274325 - protein, 15 aa, Artificial Sequence
  Description of Artificial Sequence: Synthetic peptide
  Seed: SIGKVCRTLLAKSVF
SIWKVKRRLLSKSVF

SEQ ID NO: 274326 - protein, 15 aa, Artificial Sequence
  Description of Artificial Sequence: Synthetic peptide
  Seed: SIGKVCRTLLAKSVF
SIWKVKRRLLTKSVF

SEQ ID NO: 274327 - protein, 15 aa, Artificial Sequence
  Description of Artificial Sequence: Synthetic peptide
  Seed: SIGKVCRTLLAKSVF
SIWKVKRRLLVKSVF

SEQ ID NO: 274328 - protein, 15 aa, Artificial Sequence
  Description of Artificial Sequence: Synthetic peptide
  Seed: SIGKVCRTLLAKSVF
SIWKVKRRLLYKSVF

SEQ ID NO: 274329 - protein, 15 aa, Artificial Sequence
  Description of Artificial Sequence: Synthetic peptide
  Seed: SIGKVCRTLLAKSVF
SIWKVKRSLLAKSVF

SEQ ID NO: 274330 - protein, 15 aa, Artificial Sequence
  Description of Artificial Sequence: Synthetic peptide
  Seed: SIGKVCRTLLAKSVF
SIWKVKRSLLGKSVF

SEQ ID NO: 274331 - protein, 15 aa, Artificial Sequence
  Description of Artificial Sequence: Synthetic peptide
  Seed: SIGKVCRTLLAKSVF
SIWKVKRSLLQKSVF

SEQ ID NO: 274332 - protein, 15 aa, Artificial Sequence
  Description of Artificial Sequence: Synthetic peptide
  Seed: SIGKVCRTLLAKSVF
SIWKVKRSLLSKSVF

SEQ ID NO: 274333 - protein, 15 aa, Artificial Sequence
  Description of Artificial Sequence: Synthetic peptide
  Seed: SIGKVCRTLLAKSVF
SIWKVKRTLLAKSVF

SEQ ID NO: 274334 - protein, 15 aa, Artificial Sequence
  Description of Artificial Sequence: Synthetic peptide
  Seed: SIGKVCRTLLAKSVF
SIWKVKRTLLHKSVF

SEQ ID NO: 274335 - protein, 15 aa, Artificial Sequence
  Description of Artificial Sequence: Synthetic peptide
  Seed: SIGKVCRTLLAKSVF
SIWKVKRTLLQKSVF

SEQ ID NO: 274336 - protein, 15 aa, Artificial Sequence
  Description of Artificial Sequence: Synthetic peptide
  Seed: SIGKVCRTLLAKSVF
SIWKVKRTLLRKSVF

SEQ ID NO: 274337 - protein, 15 aa, Artificial Sequence
  Description of Artificial Sequence: Synthetic peptide
  Seed: SIGKVCRTLLAKSVF
SIWKVKRTLLSKSVF

SEQ ID NO: 274338 - protein, 15 aa, Artificial Sequence
  Description of Artificial Sequence: Synthetic peptide
  Seed: SIGKVCRTLLAKSVF
SIWKVLRALLHKSVF

SEQ ID NO: 274339 - protein, 15 aa, Artificial Sequence
  Description of Artificial Sequence: Synthetic peptide
  Seed: SIGKVCRTLLAKSVF
SIWKVLRALLSKSVF

SEQ ID NO: 274340 - protein, 15 aa, Artificial Sequence
  Description of Artificial Sequence: Synthetic peptide
  Seed: SIGKVCRTLLAKSVF
SIWKVLRGLLRKSVF

SEQ ID NO: 274341 - protein, 15 aa, Artificial Sequence
  Description of Artificial Sequence: Synthetic peptide
  Seed: SIGKVCRTLLAKSVF
SIWKVLRHLLAKSVF

SEQ ID NO: 274342 - protein, 15 aa, Artificial Sequence
  Description of Artificial Sequence: Synthetic peptide
  Seed: SIGKVCRTLLAKSVF
SIWKVLRHLLGKSVF

SEQ ID NO: 274343 - protein, 15 aa, Artificial Sequence
  Description of Artificial Sequence: Synthetic peptide
  Seed: SIGKVCRTLLAKSVF
SIWKVLRHLLHKSVF

SEQ ID NO: 274344 - protein, 15 aa, Artificial Sequence
  Description of Artificial Sequence: Synthetic peptide
  Seed: SIGKVCRTLLAKSVF
SIWKVLRHLLKKSVF

SEQ ID NO: 274345 - protein, 15 aa, Artificial Sequence
  Description of Artificial Sequence: Synthetic peptide
  Seed: SIGKVCRTLLAKSVF
SIWKVLRHLLRKSVF

SEQ ID NO: 274346 - protein, 15 aa, Artificial Sequence
  Description of Artificial Sequence: Synthetic peptide
  Seed: SIGKVCRTLLAKSVF
SIWKVLRHLLSKSVF

SEQ ID NO: 274347 - protein, 15 aa, Artificial Sequence
  Description of Artificial Sequence: Synthetic peptide
  Seed: SIGKVCRTLLAKSVF
SIWKVLRHLLTKSVF

SEQ ID NO: 274348 - protein, 15 aa, Artificial Sequence
  Description of Artificial Sequence: Synthetic peptide
  Seed: SIGKVCRTLLAKSVF
SIWKVLRKLLAKSVF

SEQ ID NO: 274349 - protein, 15 aa, Artificial Sequence
  Description of Artificial Sequence: Synthetic peptide
  Seed: SIGKVCRTLLAKSVF
SIWKVLRKLLDKSVF

SEQ ID NO: 274350 - protein, 15 aa, Artificial Sequence
  Description of Artificial Sequence: Synthetic peptide
  Seed: SIGKVCRTLLAKSVF
SIWKVLRKLLEKSVF

SEQ ID NO: 274351 - protein, 15 aa, Artificial Sequence
  Description of Artificial Sequence: Synthetic peptide
  Seed: SIGKVCRTLLAKSVF
SIWKVLRKLLGKSVF

SEQ ID NO: 274352 - protein, 15 aa, Artificial Sequence
  Description of Artificial Sequence: Synthetic peptide
  Seed: SIGKVCRTLLAKSVF
SIWKVLRKLLHKSVF

SEQ ID NO: 274353 - protein, 15 aa, Artificial Sequence
  Description of Artificial Sequence: Synthetic peptide
  Seed: SIGKVCRTLLAKSVF
SIWKVLRKLLIKSVF

SEQ ID NO: 274354 - protein, 15 aa, Artificial Sequence
  Description of Artificial Sequence: Synthetic peptide
  Seed: SIGKVCRTLLAKSVF
SIWKVLRKLLKKSVF

SEQ ID NO: 274355 - protein, 15 aa, Artificial Sequence
  Description of Artificial Sequence: Synthetic peptide
  Seed: SIGKVCRTLLAKSVF
SIWKVLRKLLLKSVF

SEQ ID NO: 274356 - protein, 15 aa, Artificial Sequence
  Description of Artificial Sequence: Synthetic peptide
  Seed: SIGKVCRTLLAKSVF
SIWKVLRKLLMKSVF

SEQ ID NO: 274357 - protein, 15 aa, Artificial Sequence
  Description of Artificial Sequence: Synthetic peptide
  Seed: SIGKVCRTLLAKSVF
SIWKVLRKLLNKSVF

SEQ ID NO: 274358 - protein, 15 aa, Artificial Sequence
  Description of Artificial Sequence: Synthetic peptide
  Seed: SIGKVCRTLLAKSVF
SIWKVLRKLLPKSVF

SEQ ID NO: 274359 - protein, 15 aa, Artificial Sequence
  Description of Artificial Sequence: Synthetic peptide
  Seed: SIGKVCRTLLAKSVF
SIWKVLRKLLQKSVF

SEQ ID NO: 274360 - protein, 15 aa, Artificial Sequence
  Description of Artificial Sequence: Synthetic peptide
  Seed: SIGKVCRTLLAKSVF
SIWKVLRKLLRKSVF

SEQ ID NO: 274361 - protein, 15 aa, Artificial Sequence
  Description of Artificial Sequence: Synthetic peptide
  Seed: SIGKVCRTLLAKSVF
SIWKVLRKLLSKSVF

SEQ ID NO: 274362 - protein, 15 aa, Artificial Sequence
  Description of Artificial Sequence: Synthetic peptide
  Seed: SIGKVCRTLLAKSVF
SIWKVLRKLLTKSVF

SEQ ID NO: 274363 - protein, 15 aa, Artificial Sequence
  Description of Artificial Sequence: Synthetic peptide
  Seed: SIGKVCRTLLAKSVF
SIWKVLRKLLVKSVF

SEQ ID NO: 274364 - protein, 15 aa, Artificial Sequence
  Description of Artificial Sequence: Synthetic peptide
  Seed: SIGKVCRTLLAKSVF
SIWKVLRKLLYKSVF

SEQ ID NO: 274365 - protein, 15 aa, Artificial Sequence
  Description of Artificial Sequence: Synthetic peptide
  Seed: SIGKVCRTLLAKSVF
SIWKVLRNLLAKSVF

SEQ ID NO: 274366 - protein, 15 aa, Artificial Sequence
  Description of Artificial Sequence: Synthetic peptide
  Seed: SIGKVCRTLLAKSVF
SIWKVLRNLLDKSVF

SEQ ID NO: 274367 - protein, 15 aa, Artificial Sequence
  Description of Artificial Sequence: Synthetic peptide
  Seed: SIGKVCRTLLAKSVF
SIWKVLRNLLEKSVF

SEQ ID NO: 274368 - protein, 15 aa, Artificial Sequence
  Description of Artificial Sequence: Synthetic peptide
  Seed: SIGKVCRTLLAKSVF
SIWKVLRNLLHKSVF

SEQ ID NO: 274369 - protein, 15 aa, Artificial Sequence
  Description of Artificial Sequence: Synthetic peptide
  Seed: SIGKVCRTLLAKSVF
SIWKVLRNLLSKSVF

SEQ ID NO: 274370 - protein, 15 aa, Artificial Sequence
  Description of Artificial Sequence: Synthetic peptide
  Seed: SIGKVCRTLLAKSVF
SIWKVLRPLLAKSVF

SEQ ID NO: 274371 - protein, 15 aa, Artificial Sequence
  Description of Artificial Sequence: Synthetic peptide
  Seed: SIGKVCRTLLAKSVF
SIWKVLRPLLGKSVF

SEQ ID NO: 274372 - protein, 15 aa, Artificial Sequence
  Description of Artificial Sequence: Synthetic peptide
  Seed: SIGKVCRTLLAKSVF
SIWKVLRPLLHKSVF

SEQ ID NO: 274373 - protein, 15 aa, Artificial Sequence
  Description of Artificial Sequence: Synthetic peptide
  Seed: SIGKVCRTLLAKSVF
SIWKVLRPLLKKSVF

SEQ ID NO: 274374 - protein, 15 aa, Artificial Sequence
  Description of Artificial Sequence: Synthetic peptide
  Seed: SIGKVCRTLLAKSVF
SIWKVLRPLLQKSVF

SEQ ID NO: 274375 - protein, 15 aa, Artificial Sequence
  Description of Artificial Sequence: Synthetic peptide
  Seed: SIGKVCRTLLAKSVF
SIWKVLRPLLSKSVF

SEQ ID NO: 274376 - protein, 15 aa, Artificial Sequence
  Description of Artificial Sequence: Synthetic peptide
  Seed: SIGKVCRTLLAKSVF
SIWKVLRRLLAKSVF

SEQ ID NO: 274377 - protein, 15 aa, Artificial Sequence
  Description of Artificial Sequence: Synthetic peptide
  Seed: SIGKVCRTLLAKSVF
SIWKVLRRLLDKSVF

SEQ ID NO: 274378 - protein, 15 aa, Artificial Sequence
  Description of Artificial Sequence: Synthetic peptide
  Seed: SIGKVCRTLLAKSVF
SIWKVLRRLLEKSVF

SEQ ID NO: 274379 - protein, 15 aa, Artificial Sequence
  Description of Artificial Sequence: Synthetic peptide
  Seed: SIGKVCRTLLAKSVF
SIWKVLRRLLGKSVF

SEQ ID NO: 274380 - protein, 15 aa, Artificial Sequence
  Description of Artificial Sequence: Synthetic peptide
  Seed: SIGKVCRTLLAKSVF
SIWKVLRRLLHKSVF

SEQ ID NO: 274381 - protein, 15 aa, Artificial Sequence
  Description of Artificial Sequence: Synthetic peptide
  Seed: SIGKVCRTLLAKSVF
SIWKVLRRLLIKSVF

SEQ ID NO: 274382 - protein, 15 aa, Artificial Sequence
  Description of Artificial Sequence: Synthetic peptide
  Seed: SIGKVCRTLLAKSVF
SIWKVLRRLLKKSVF

SEQ ID NO: 274383 - protein, 15 aa, Artificial Sequence
  Description of Artificial Sequence: Synthetic peptide
  Seed: SIGKVCRTLLAKSVF
SIWKVLRRLLLKSVF

SEQ ID NO: 274384 - protein, 15 aa, Artificial Sequence
  Description of Artificial Sequence: Synthetic peptide
  Seed: SIGKVCRTLLAKSVF
SIWKVLRRLLMKSVF

SEQ ID NO: 274385 - protein, 15 aa, Artificial Sequence
  Description of Artificial Sequence: Synthetic peptide
  Seed: SIGKVCRTLLAKSVF
SIWKVLRRLLNKSVF

SEQ ID NO: 274386 - protein, 15 aa, Artificial Sequence
  Description of Artificial Sequence: Synthetic peptide
  Seed: SIGKVCRTLLAKSVF
SIWKVLRRLLPKSVF

SEQ ID NO: 274387 - protein, 15 aa, Artificial Sequence
  Description of Artificial Sequence: Synthetic peptide
  Seed: SIGKVCRTLLAKSVF
SIWKVLRRLLQKSVF

SEQ ID NO: 274388 - protein, 15 aa, Artificial Sequence
  Description of Artificial Sequence: Synthetic peptide
  Seed: SIGKVCRTLLAKSVF
SIWKVLRRLLRKSVF

SEQ ID NO: 274389 - protein, 15 aa, Artificial Sequence
  Description of Artificial Sequence: Synthetic peptide
  Seed: SIGKVCRTLLAKSVF
SIWKVLRRLLSKSVF

SEQ ID NO: 274390 - protein, 15 aa, Artificial Sequence
  Description of Artificial Sequence: Synthetic peptide
  Seed: SIGKVCRTLLAKSVF
SIWKVLRRLLTKSVF

SEQ ID NO: 274391 - protein, 15 aa, Artificial Sequence
  Description of Artificial Sequence: Synthetic peptide
  Seed: SIGKVCRTLLAKSVF
SIWKVLRRLLVKSVF

SEQ ID NO: 274392 - protein, 15 aa, Artificial Sequence
  Description of Artificial Sequence: Synthetic peptide
  Seed: SIGKVCRTLLAKSVF
SIWKVLRRLLYKSVF

SEQ ID NO: 274393 - protein, 15 aa, Artificial Sequence
  Description of Artificial Sequence: Synthetic peptide
  Seed: SIGKVCRTLLAKSVF
SIWKVLRSLLAKSVF

SEQ ID NO: 274394 - protein, 15 aa, Artificial Sequence
  Description of Artificial Sequence: Synthetic peptide
  Seed: SIGKVCRTLLAKSVF
SIWKVLRSLLDKSVF

SEQ ID NO: 274395 - protein, 15 aa, Artificial Sequence
  Description of Artificial Sequence: Synthetic peptide
  Seed: SIGKVCRTLLAKSVF
SIWKVLRSLLEKSVF

SEQ ID NO: 274396 - protein, 15 aa, Artificial Sequence
  Description of Artificial Sequence: Synthetic peptide
  Seed: SIGKVCRTLLAKSVF
SIWKVLRSLLGKSVF

SEQ ID NO: 274397 - protein, 15 aa, Artificial Sequence
  Description of Artificial Sequence: Synthetic peptide
  Seed: SIGKVCRTLLAKSVF
SIWKVLRSLLHKSVF

SEQ ID NO: 274398 - protein, 15 aa, Artificial Sequence
  Description of Artificial Sequence: Synthetic peptide
  Seed: SIGKVCRTLLAKSVF
SIWKVLRSLLKKSVF

SEQ ID NO: 274399 - protein, 15 aa, Artificial Sequence
  Description of Artificial Sequence: Synthetic peptide
  Seed: SIGKVCRTLLAKSVF
SIWKVLRSLLRKSVF

SEQ ID NO: 274400 - protein, 15 aa, Artificial Sequence
  Description of Artificial Sequence: Synthetic peptide
  Seed: SIGKVCRTLLAKSVF
SIWKVLRSLLSKSVF

SEQ ID NO: 274401 - protein, 15 aa, Artificial Sequence
  Description of Artificial Sequence: Synthetic peptide
  Seed: SIGKVCRTLLAKSVF
SIWKVLRTLLAKSVF

SEQ ID NO: 274402 - protein, 15 aa, Artificial Sequence
  Description of Artificial Sequence: Synthetic peptide
  Seed: SIGKVCRTLLAKSVF
SIWKVLRTLLDKSVF

SEQ ID NO: 274403 - protein, 15 aa, Artificial Sequence
  Description of Artificial Sequence: Synthetic peptide
  Seed: SIGKVCRTLLAKSVF
SIWKVLRTLLEKSVF

SEQ ID NO: 274404 - protein, 15 aa, Artificial Sequence
  Description of Artificial Sequence: Synthetic peptide
  Seed: SIGKVCRTLLAKSVF
SIWKVLRTLLGKSVF

SEQ ID NO: 274405 - protein, 15 aa, Artificial Sequence
  Description of Artificial Sequence: Synthetic peptide
  Seed: SIGKVCRTLLAKSVF
SIWKVLRTLLHKSVF

SEQ ID NO: 274406 - protein, 15 aa, Artificial Sequence
  Description of Artificial Sequence: Synthetic peptide
  Seed: SIGKVCRTLLAKSVF
SIWKVLRTLLKKSVF

SEQ ID NO: 274407 - protein, 15 aa, Artificial Sequence
  Description of Artificial Sequence: Synthetic peptide
  Seed: SIGKVCRTLLAKSVF
SIWKVLRTLLRKSVF

SEQ ID NO: 274408 - protein, 15 aa, Artificial Sequence
  Description of Artificial Sequence: Synthetic peptide
  Seed: SIGKVCRTLLAKSVF
SIWKVLRTLLSKSVF

SEQ ID NO: 274409 - protein, 15 aa, Artificial Sequence
  Description of Artificial Sequence: Synthetic peptide
  Seed: SIGKVCRTLLAKSVF
SIWKVMRALLAKSVF

SEQ ID NO: 274410 - protein, 15 aa, Artificial Sequence
  Description of Artificial Sequence: Synthetic peptide
  Seed: SIGKVCRTLLAKSVF
SIWKVMRALLDKSVF

SEQ ID NO: 274411 - protein, 15 aa, Artificial Sequence
  Description of Artificial Sequence: Synthetic peptide
  Seed: SIGKVCRTLLAKSVF
SIWKVMRALLGKSVF

SEQ ID NO: 274412 - protein, 15 aa, Artificial Sequence
  Description of Artificial Sequence: Synthetic peptide
  Seed: SIGKVCRTLLAKSVF
SIWKVMRALLHKSVF

SEQ ID NO: 274413 - protein, 15 aa, Artificial Sequence
  Description of Artificial Sequence: Synthetic peptide
  Seed: SIGKVCRTLLAKSVF
SIWKVMRALLKKSVF

SEQ ID NO: 274414 - protein, 15 aa, Artificial Sequence
  Description of Artificial Sequence: Synthetic peptide
  Seed: SIGKVCRTLLAKSVF
SIWKVMRALLRKSVF

SEQ ID NO: 274415 - protein, 15 aa, Artificial Sequence
  Description of Artificial Sequence: Synthetic peptide
  Seed: SIGKVCRTLLAKSVF
SIWKVMRALLSKSVF

SEQ ID NO: 274416 - protein, 15 aa, Artificial Sequence
  Description of Artificial Sequence: Synthetic peptide
  Seed: SIGKVCRTLLAKSVF
SIWKVMRELLRKSVF

SEQ ID NO: 274417 - protein, 15 aa, Artificial Sequence
  Description of Artificial Sequence: Synthetic peptide
  Seed: SIGKVCRTLLAKSVF
SIWKVMRGLLHKSVF

SEQ ID NO: 274418 - protein, 15 aa, Artificial Sequence
  Description of Artificial Sequence: Synthetic peptide
  Seed: SIGKVCRTLLAKSVF
SIWKVMRGLLKKSVF

SEQ ID NO: 274419 - protein, 15 aa, Artificial Sequence
  Description of Artificial Sequence: Synthetic peptide
  Seed: SIGKVCRTLLAKSVF
SIWKVMRGLLRKSVF

SEQ ID NO: 274420 - protein, 15 aa, Artificial Sequence
  Description of Artificial Sequence: Synthetic peptide
  Seed: SIGKVCRTLLAKSVF
SIWKVMRGLLSKSVF

SEQ ID NO: 274421 - protein, 15 aa, Artificial Sequence
  Description of Artificial Sequence: Synthetic peptide
  Seed: SIGKVCRTLLAKSVF
SIWKVMRHLLAKSVF

SEQ ID NO: 274422 - protein, 15 aa, Artificial Sequence
  Description of Artificial Sequence: Synthetic peptide
  Seed: SIGKVCRTLLAKSVF
SIWKVMRHLLGKSVF

SEQ ID NO: 274423 - protein, 15 aa, Artificial Sequence
  Description of Artificial Sequence: Synthetic peptide
  Seed: SIGKVCRTLLAKSVF
SIWKVMRHLLHKSVF

SEQ ID NO: 274424 - protein, 15 aa, Artificial Sequence
  Description of Artificial Sequence: Synthetic peptide
  Seed: SIGKVCRTLLAKSVF
SIWKVMRHLLKKSVF

SEQ ID NO: 274425 - protein, 15 aa, Artificial Sequence
  Description of Artificial Sequence: Synthetic peptide
  Seed: SIGKVCRTLLAKSVF
SIWKVMRHLLNKSVF

SEQ ID NO: 274426 - protein, 15 aa, Artificial Sequence
  Description of Artificial Sequence: Synthetic peptide
  Seed: SIGKVCRTLLAKSVF
SIWKVMRHLLQKSVF

SEQ ID NO: 274427 - protein, 15 aa, Artificial Sequence
  Description of Artificial Sequence: Synthetic peptide
  Seed: SIGKVCRTLLAKSVF
SIWKVMRHLLRKSVF

SEQ ID NO: 274428 - protein, 15 aa, Artificial Sequence
  Description of Artificial Sequence: Synthetic peptide
  Seed: SIGKVCRTLLAKSVF
SIWKVMRHLLSKSVF

SEQ ID NO: 274429 - protein, 15 aa, Artificial Sequence
  Description of Artificial Sequence: Synthetic peptide
  Seed: SIGKVCRTLLAKSVF
SIWKVMRHLLTKSVF

SEQ ID NO: 274430 - protein, 15 aa, Artificial Sequence
  Description of Artificial Sequence: Synthetic peptide
  Seed: SIGKVCRTLLAKSVF
SIWKVMRKLLAKSVF

SEQ ID NO: 274431 - protein, 15 aa, Artificial Sequence
  Description of Artificial Sequence: Synthetic peptide
  Seed: SIGKVCRTLLAKSVF
SIWKVMRKLLCKSVF

SEQ ID NO: 274432 - protein, 15 aa, Artificial Sequence
  Description of Artificial Sequence: Synthetic peptide
  Seed: SIGKVCRTLLAKSVF
SIWKVMRKLLDKSVF

SEQ ID NO: 274433 - protein, 15 aa, Artificial Sequence
  Description of Artificial Sequence: Synthetic peptide
  Seed: SIGKVCRTLLAKSVF
SIWKVMRKLLEKSVF

SEQ ID NO: 274434 - protein, 15 aa, Artificial Sequence
  Description of Artificial Sequence: Synthetic peptide
  Seed: SIGKVCRTLLAKSVF
SIWKVMRKLLFKSVF

SEQ ID NO: 274435 - protein, 15 aa, Artificial Sequence
  Description of Artificial Sequence: Synthetic peptide
  Seed: SIGKVCRTLLAKSVF
SIWKVMRKLLGKSVF

SEQ ID NO: 274436 - protein, 15 aa, Artificial Sequence
  Description of Artificial Sequence: Synthetic peptide
  Seed: SIGKVCRTLLAKSVF
SIWKVMRKLLHKSVF

SEQ ID NO: 274437 - protein, 15 aa, Artificial Sequence
  Description of Artificial Sequence: Synthetic peptide
  Seed: SIGKVCRTLLAKSVF
SIWKVMRKLLIKSVF

SEQ ID NO: 274438 - protein, 15 aa, Artificial Sequence
  Description of Artificial Sequence: Synthetic peptide
  Seed: SIGKVCRTLLAKSVF
SIWKVMRKLLKKSVF

SEQ ID NO: 274439 - protein, 15 aa, Artificial Sequence
  Description of Artificial Sequence: Synthetic peptide
  Seed: SIGKVCRTLLAKSVF
SIWKVMRKLLLKSVF

SEQ ID NO: 274440 - protein, 15 aa, Artificial Sequence
  Description of Artificial Sequence: Synthetic peptide
  Seed: SIGKVCRTLLAKSVF
SIWKVMRKLLMKSVF

SEQ ID NO: 274441 - protein, 15 aa, Artificial Sequence
  Description of Artificial Sequence: Synthetic peptide
  Seed: SIGKVCRTLLAKSVF
SIWKVMRKLLNKSVF

SEQ ID NO: 274442 - protein, 15 aa, Artificial Sequence
  Description of Artificial Sequence: Synthetic peptide
  Seed: SIGKVCRTLLAKSVF
SIWKVMRKLLPKSVF

SEQ ID NO: 274443 - protein, 15 aa, Artificial Sequence
  Description of Artificial Sequence: Synthetic peptide
  Seed: SIGKVCRTLLAKSVF
SIWKVMRKLLQKSVF

SEQ ID NO: 274444 - protein, 15 aa, Artificial Sequence
  Description of Artificial Sequence: Synthetic peptide
  Seed: SIGKVCRTLLAKSVF
SIWKVMRKLLRKSVF

SEQ ID NO: 274445 - protein, 15 aa, Artificial Sequence
  Description of Artificial Sequence: Synthetic peptide
  Seed: SIGKVCRTLLAKSVF
SIWKVMRKLLSKSVF

SEQ ID NO: 274446 - protein, 15 aa, Artificial Sequence
  Description of Artificial Sequence: Synthetic peptide
  Seed: SIGKVCRTLLAKSVF
SIWKVMRKLLTKSVF

SEQ ID NO: 274447 - protein, 15 aa, Artificial Sequence
  Description of Artificial Sequence: Synthetic peptide
  Seed: SIGKVCRTLLAKSVF
SIWKVMRKLLVKSVF

SEQ ID NO: 274448 - protein, 15 aa, Artificial Sequence
  Description of Artificial Sequence: Synthetic peptide
  Seed: SIGKVCRTLLAKSVF
SIWKVMRKLLYKSVF

SEQ ID NO: 274449 - protein, 15 aa, Artificial Sequence
  Description of Artificial Sequence: Synthetic peptide
  Seed: SIGKVCRTLLAKSVF
SIWKVMRNLLAKSVF

SEQ ID NO: 274450 - protein, 15 aa, Artificial Sequence
  Description of Artificial Sequence: Synthetic peptide
  Seed: SIGKVCRTLLAKSVF
SIWKVMRNLLDKSVF

SEQ ID NO: 274451 - protein, 15 aa, Artificial Sequence
  Description of Artificial Sequence: Synthetic peptide
  Seed: SIGKVCRTLLAKSVF
SIWKVMRNLLEKSVF

SEQ ID NO: 274452 - protein, 15 aa, Artificial Sequence
  Description of Artificial Sequence: Synthetic peptide
  Seed: SIGKVCRTLLAKSVF
SIWKVMRNLLGKSVF

SEQ ID NO: 274453 - protein, 15 aa, Artificial Sequence
  Description of Artificial Sequence: Synthetic peptide
  Seed: SIGKVCRTLLAKSVF
SIWKVMRNLLHKSVF

SEQ ID NO: 274454 - protein, 15 aa, Artificial Sequence
  Description of Artificial Sequence: Synthetic peptide
  Seed: SIGKVCRTLLAKSVF
SIWKVMRNLLNKSVF

SEQ ID NO: 274455 - protein, 15 aa, Artificial Sequence
  Description of Artificial Sequence: Synthetic peptide
  Seed: SIGKVCRTLLAKSVF
SIWKVMRNLLQKSVF

SEQ ID NO: 274456 - protein, 15 aa, Artificial Sequence
  Description of Artificial Sequence: Synthetic peptide
  Seed: SIGKVCRTLLAKSVF
SIWKVMRNLLRKSVF

SEQ ID NO: 274457 - protein, 15 aa, Artificial Sequence
  Description of Artificial Sequence: Synthetic peptide
  Seed: SIGKVCRTLLAKSVF
SIWKVMRNLLSKSVF

SEQ ID NO: 274458 - protein, 15 aa, Artificial Sequence
  Description of Artificial Sequence: Synthetic peptide
  Seed: SIGKVCRTLLAKSVF
SIWKVMRNLLTKSVF

SEQ ID NO: 274459 - protein, 15 aa, Artificial Sequence
  Description of Artificial Sequence: Synthetic peptide
  Seed: SIGKVCRTLLAKSVF
SIWKVMRPLLAKSVF

SEQ ID NO: 274460 - protein, 15 aa, Artificial Sequence
  Description of Artificial Sequence: Synthetic peptide
  Seed: SIGKVCRTLLAKSVF
SIWKVMRPLLGKSVF

SEQ ID NO: 274461 - protein, 15 aa, Artificial Sequence
  Description of Artificial Sequence: Synthetic peptide
  Seed: SIGKVCRTLLAKSVF
SIWKVMRPLLHKSVF

SEQ ID NO: 274462 - protein, 15 aa, Artificial Sequence
  Description of Artificial Sequence: Synthetic peptide
  Seed: SIGKVCRTLLAKSVF
SIWKVMRPLLKKSVF

SEQ ID NO: 274463 - protein, 15 aa, Artificial Sequence
  Description of Artificial Sequence: Synthetic peptide
  Seed: SIGKVCRTLLAKSVF
SIWKVMRPLLNKSVF

SEQ ID NO: 274464 - protein, 15 aa, Artificial Sequence
  Description of Artificial Sequence: Synthetic peptide
  Seed: SIGKVCRTLLAKSVF
SIWKVMRPLLQKSVF

SEQ ID NO: 274465 - protein, 15 aa, Artificial Sequence
  Description of Artificial Sequence: Synthetic peptide
  Seed: SIGKVCRTLLAKSVF
SIWKVMRPLLRKSVF

SEQ ID NO: 274466 - protein, 15 aa, Artificial Sequence
  Description of Artificial Sequence: Synthetic peptide
  Seed: SIGKVCRTLLAKSVF
SIWKVMRPLLSKSVF

SEQ ID NO: 274467 - protein, 15 aa, Artificial Sequence
  Description of Artificial Sequence: Synthetic peptide
  Seed: SIGKVCRTLLAKSVF
SIWKVMRPLLTKSVF

SEQ ID NO: 274468 - protein, 15 aa, Artificial Sequence
  Description of Artificial Sequence: Synthetic peptide
  Seed: SIGKVCRTLLAKSVF
SIWKVMRRLLAKSVF

SEQ ID NO: 274469 - protein, 15 aa, Artificial Sequence
  Description of Artificial Sequence: Synthetic peptide
  Seed: SIGKVCRTLLAKSVF
SIWKVMRRLLDKSVF

SEQ ID NO: 274470 - protein, 15 aa, Artificial Sequence
  Description of Artificial Sequence: Synthetic peptide
  Seed: SIGKVCRTLLAKSVF
SIWKVMRRLLEKSVF

SEQ ID NO: 274471 - protein, 15 aa, Artificial Sequence
  Description of Artificial Sequence: Synthetic peptide
  Seed: SIGKVCRTLLAKSVF
SIWKVMRRLLFKSVF

SEQ ID NO: 274472 - protein, 15 aa, Artificial Sequence
  Description of Artificial Sequence: Synthetic peptide
  Seed: SIGKVCRTLLAKSVF
SIWKVMRRLLGKSVF

SEQ ID NO: 274473 - protein, 15 aa, Artificial Sequence
  Description of Artificial Sequence: Synthetic peptide
  Seed: SIGKVCRTLLAKSVF
SIWKVMRRLLHKSVF

SEQ ID NO: 274474 - protein, 15 aa, Artificial Sequence
  Description of Artificial Sequence: Synthetic peptide
  Seed: SIGKVCRTLLAKSVF
SIWKVMRRLLIKSVF

SEQ ID NO: 274475 - protein, 15 aa, Artificial Sequence
  Description of Artificial Sequence: Synthetic peptide
  Seed: SIGKVCRTLLAKSVF
SIWKVMRRLLKKSVF

SEQ ID NO: 274476 - protein, 15 aa, Artificial Sequence
  Description of Artificial Sequence: Synthetic peptide
  Seed: SIGKVCRTLLAKSVF
SIWKVMRRLLLKSVF

SEQ ID NO: 274477 - protein, 15 aa, Artificial Sequence
  Description of Artificial Sequence: Synthetic peptide
  Seed: SIGKVCRTLLAKSVF
SIWKVMRRLLMKSVF

SEQ ID NO: 274478 - protein, 15 aa, Artificial Sequence
  Description of Artificial Sequence: Synthetic peptide
  Seed: SIGKVCRTLLAKSVF
SIWKVMRRLLNKSVF

SEQ ID NO: 274479 - protein, 15 aa, Artificial Sequence
  Description of Artificial Sequence: Synthetic peptide
  Seed: SIGKVCRTLLAKSVF
SIWKVMRRLLPKSVF

SEQ ID NO: 274480 - protein, 15 aa, Artificial Sequence
  Description of Artificial Sequence: Synthetic peptide
  Seed: SIGKVCRTLLAKSVF
SIWKVMRRLLQKSVF

SEQ ID NO: 274481 - protein, 15 aa, Artificial Sequence
  Description of Artificial Sequence: Synthetic peptide
  Seed: SIGKVCRTLLAKSVF
SIWKVMRRLLRKSVF

SEQ ID NO: 274482 - protein, 15 aa, Artificial Sequence
  Description of Artificial Sequence: Synthetic peptide
  Seed: SIGKVCRTLLAKSVF
SIWKVMRRLLSKSVF

SEQ ID NO: 274483 - protein, 15 aa, Artificial Sequence
  Description of Artificial Sequence: Synthetic peptide
  Seed: SIGKVCRTLLAKSVF
SIWKVMRRLLTKSVF

SEQ ID NO: 274484 - protein, 15 aa, Artificial Sequence
  Description of Artificial Sequence: Synthetic peptide
  Seed: SIGKVCRTLLAKSVF
SIWKVMRRLLVKSVF

SEQ ID NO: 274485 - protein, 15 aa, Artificial Sequence
  Description of Artificial Sequence: Synthetic peptide
  Seed: SIGKVCRTLLAKSVF
SIWKVMRRLLWKSVF

SEQ ID NO: 274486 - protein, 15 aa, Artificial Sequence
  Description of Artificial Sequence: Synthetic peptide
  Seed: SIGKVCRTLLAKSVF
SIWKVMRRLLYKSVF

SEQ ID NO: 274487 - protein, 15 aa, Artificial Sequence
  Description of Artificial Sequence: Synthetic peptide
  Seed: SIGKVCRTLLAKSVF
SIWKVMRSLLAKSVF

SEQ ID NO: 274488 - protein, 15 aa, Artificial Sequence
  Description of Artificial Sequence: Synthetic peptide
  Seed: SIGKVCRTLLAKSVF
SIWKVMRSLLDKSVF

SEQ ID NO: 274489 - protein, 15 aa, Artificial Sequence
  Description of Artificial Sequence: Synthetic peptide
  Seed: SIGKVCRTLLAKSVF
SIWKVMRSLLEKSVF

SEQ ID NO: 274490 - protein, 15 aa, Artificial Sequence
  Description of Artificial Sequence: Synthetic peptide
  Seed: SIGKVCRTLLAKSVF
SIWKVMRSLLGKSVF

SEQ ID NO: 274491 - protein, 15 aa, Artificial Sequence
  Description of Artificial Sequence: Synthetic peptide
  Seed: SIGKVCRTLLAKSVF
SIWKVMRSLLHKSVF

SEQ ID NO: 274492 - protein, 15 aa, Artificial Sequence
  Description of Artificial Sequence: Synthetic peptide
  Seed: SIGKVCRTLLAKSVF
SIWKVMRSLLKKSVF

SEQ ID NO: 274493 - protein, 15 aa, Artificial Sequence
  Description of Artificial Sequence: Synthetic peptide
  Seed: SIGKVCRTLLAKSVF
SIWKVMRSLLNKSVF

SEQ ID NO: 274494 - protein, 15 aa, Artificial Sequence
  Description of Artificial Sequence: Synthetic peptide
  Seed: SIGKVCRTLLAKSVF
SIWKVMRSLLRKSVF

SEQ ID NO: 274495 - protein, 15 aa, Artificial Sequence
  Description of Artificial Sequence: Synthetic peptide
  Seed: SIGKVCRTLLAKSVF
SIWKVMRSLLSKSVF

SEQ ID NO: 274496 - protein, 15 aa, Artificial Sequence
  Description of Artificial Sequence: Synthetic peptide
  Seed: SIGKVCRTLLAKSVF
SIWKVMRSLLTKSVF

SEQ ID NO: 274497 - protein, 15 aa, Artificial Sequence
  Description of Artificial Sequence: Synthetic peptide
  Seed: SIGKVCRTLLAKSVF
SIWKVMRTLLAKSVF

SEQ ID NO: 274498 - protein, 15 aa, Artificial Sequence
  Description of Artificial Sequence: Synthetic peptide
  Seed: SIGKVCRTLLAKSVF
SIWKVMRTLLDKSVF

SEQ ID NO: 274499 - protein, 15 aa, Artificial Sequence
  Description of Artificial Sequence: Synthetic peptide
  Seed: SIGKVCRTLLAKSVF
SIWKVMRTLLEKSVF

SEQ ID NO: 274500 - protein, 15 aa, Artificial Sequence
  Description of Artificial Sequence: Synthetic peptide
  Seed: SIGKVCRTLLAKSVF
SIWKVMRTLLGKSVF

SEQ ID NO: 274501 - protein, 15 aa, Artificial Sequence
  Description of Artificial Sequence: Synthetic peptide
  Seed: SIGKVCRTLLAKSVF
SIWKVMRTLLHKSVF

SEQ ID NO: 274502 - protein, 15 aa, Artificial Sequence
  Description of Artificial Sequence: Synthetic peptide
  Seed: SIGKVCRTLLAKSVF
SIWKVMRTLLKKSVF

SEQ ID NO: 274503 - protein, 15 aa, Artificial Sequence
  Description of Artificial Sequence: Synthetic peptide
  Seed: SIGKVCRTLLAKSVF
SIWKVMRTLLNKSVF

SEQ ID NO: 274504 - protein, 15 aa, Artificial Sequence
  Description of Artificial Sequence: Synthetic peptide
  Seed: SIGKVCRTLLAKSVF
SIWKVMRTLLQKSVF

SEQ ID NO: 274505 - protein, 15 aa, Artificial Sequence
  Description of Artificial Sequence: Synthetic peptide
  Seed: SIGKVCRTLLAKSVF
SIWKVMRTLLRKSVF

SEQ ID NO: 274506 - protein, 15 aa, Artificial Sequence
  Description of Artificial Sequence: Synthetic peptide
  Seed: SIGKVCRTLLAKSVF
SIWKVMRTLLSKSVF

SEQ ID NO: 274507 - protein, 15 aa, Artificial Sequence
  Description of Artificial Sequence: Synthetic peptide
  Seed: SIGKVCRTLLAKSVF
SIWKVMRTLLTKSVF

SEQ ID NO: 274508 - protein, 15 aa, Artificial Sequence
  Description of Artificial Sequence: Synthetic peptide
  Seed: SIGKVCRTLLAKSVF
SIWKVMRVLLDKSVF

SEQ ID NO: 274509 - protein, 15 aa, Artificial Sequence
  Description of Artificial Sequence: Synthetic peptide
  Seed: SIGKVCRTLLAKSVF
SIWKVMRVLLHKSVF

SEQ ID NO: 274510 - protein, 15 aa, Artificial Sequence
  Description of Artificial Sequence: Synthetic peptide
  Seed: SIGKVCRTLLAKSVF
SIWKVMRVLLKKSVF

SEQ ID NO: 274511 - protein, 15 aa, Artificial Sequence
  Description of Artificial Sequence: Synthetic peptide
  Seed: SIGKVCRTLLAKSVF
SIWKVMRVLLRKSVF

SEQ ID NO: 274512 - protein, 15 aa, Artificial Sequence
  Description of Artificial Sequence: Synthetic peptide
  Seed: SIGKVCRTLLAKSVF
SIWKVNRKLLAKSVF

SEQ ID NO: 274513 - protein, 15 aa, Artificial Sequence
  Description of Artificial Sequence: Synthetic peptide
  Seed: SIGKVCRTLLAKSVF
SIWKVNRKLLGKSVF

SEQ ID NO: 274514 - protein, 15 aa, Artificial Sequence
  Description of Artificial Sequence: Synthetic peptide
  Seed: SIGKVCRTLLAKSVF
SIWKVNRKLLHKSVF

SEQ ID NO: 274515 - protein, 15 aa, Artificial Sequence
  Description of Artificial Sequence: Synthetic peptide
  Seed: SIGKVCRTLLAKSVF
SIWKVNRKLLQKSVF

SEQ ID NO: 274516 - protein, 15 aa, Artificial Sequence
  Description of Artificial Sequence: Synthetic peptide
  Seed: SIGKVCRTLLAKSVF
SIWKVNRKLLRKSVF

SEQ ID NO: 274517 - protein, 15 aa, Artificial Sequence
  Description of Artificial Sequence: Synthetic peptide
  Seed: SIGKVCRTLLAKSVF
SIWKVNRKLLSKSVF

SEQ ID NO: 274518 - protein, 15 aa, Artificial Sequence
  Description of Artificial Sequence: Synthetic peptide
  Seed: SIGKVCRTLLAKSVF
SIWKVNRRLLAKSVF

SEQ ID NO: 274519 - protein, 15 aa, Artificial Sequence
  Description of Artificial Sequence: Synthetic peptide
  Seed: SIGKVCRTLLAKSVF
SIWKVNRRLLGKSVF

SEQ ID NO: 274520 - protein, 15 aa, Artificial Sequence
  Description of Artificial Sequence: Synthetic peptide
  Seed: SIGKVCRTLLAKSVF
SIWKVNRRLLHKSVF

SEQ ID NO: 274521 - protein, 15 aa, Artificial Sequence
  Description of Artificial Sequence: Synthetic peptide
  Seed: SIGKVCRTLLAKSVF
SIWKVNRRLLIKSVF

SEQ ID NO: 274522 - protein, 15 aa, Artificial Sequence
  Description of Artificial Sequence: Synthetic peptide
  Seed: SIGKVCRTLLAKSVF
SIWKVNRRLLLKSVF

SEQ ID NO: 274523 - protein, 15 aa, Artificial Sequence
  Description of Artificial Sequence: Synthetic peptide
  Seed: SIGKVCRTLLAKSVF
SIWKVNRRLLMKSVF

SEQ ID NO: 274524 - protein, 15 aa, Artificial Sequence
  Description of Artificial Sequence: Synthetic peptide
  Seed: SIGKVCRTLLAKSVF
SIWKVNRRLLNKSVF

SEQ ID NO: 274525 - protein, 15 aa, Artificial Sequence
  Description of Artificial Sequence: Synthetic peptide
  Seed: SIGKVCRTLLAKSVF
SIWKVNRRLLQKSVF

SEQ ID NO: 274526 - protein, 15 aa, Artificial Sequence
  Description of Artificial Sequence: Synthetic peptide
  Seed: SIGKVCRTLLAKSVF
SIWKVNRRLLSKSVF

SEQ ID NO: 274527 - protein, 15 aa, Artificial Sequence
  Description of Artificial Sequence: Synthetic peptide
  Seed: SIGKVCRTLLAKSVF
SIWKVNRRLLTKSVF

SEQ ID NO: 274528 - protein, 15 aa, Artificial Sequence
  Description of Artificial Sequence: Synthetic peptide
  Seed: SIGKVCRTLLAKSVF
SIWKVNRRLLVKSVF

SEQ ID NO: 274529 - protein, 15 aa, Artificial Sequence
  Description of Artificial Sequence: Synthetic peptide
  Seed: SIGKVCRTLLAKSVF
SIWKVNRRLLYKSVF

SEQ ID NO: 274530 - protein, 15 aa, Artificial Sequence
  Description of Artificial Sequence: Synthetic peptide
  Seed: SIGKVCRTLLAKSVF
SIWKVNRTLLRKSVF

SEQ ID NO: 274531 - protein, 15 aa, Artificial Sequence
  Description of Artificial Sequence: Synthetic peptide
  Seed: SIGKVCRTLLAKSVF
SIWKVQRHLLAKSVF

SEQ ID NO: 274532 - protein, 15 aa, Artificial Sequence
  Description of Artificial Sequence: Synthetic peptide
  Seed: SIGKVCRTLLAKSVF
SIWKVQRKLLAKSVF

SEQ ID NO: 274533 - protein, 15 aa, Artificial Sequence
  Description of Artificial Sequence: Synthetic peptide
  Seed: SIGKVCRTLLAKSVF
SIWKVQRKLLGKSVF

SEQ ID NO: 274534 - protein, 15 aa, Artificial Sequence
  Description of Artificial Sequence: Synthetic peptide
  Seed: SIGKVCRTLLAKSVF
SIWKVQRKLLHKSVF

SEQ ID NO: 274535 - protein, 15 aa, Artificial Sequence
  Description of Artificial Sequence: Synthetic peptide
  Seed: SIGKVCRTLLAKSVF
SIWKVQRKLLIKSVF

SEQ ID NO: 274536 - protein, 15 aa, Artificial Sequence
  Description of Artificial Sequence: Synthetic peptide
  Seed: SIGKVCRTLLAKSVF
SIWKVQRKLLKKSVF

SEQ ID NO: 274537 - protein, 15 aa, Artificial Sequence
  Description of Artificial Sequence: Synthetic peptide
  Seed: SIGKVCRTLLAKSVF
SIWKVQRKLLLKSVF

SEQ ID NO: 274538 - protein, 15 aa, Artificial Sequence
  Description of Artificial Sequence: Synthetic peptide
  Seed: SIGKVCRTLLAKSVF
SIWKVQRKLLMKSVF

SEQ ID NO: 274539 - protein, 15 aa, Artificial Sequence
  Description of Artificial Sequence: Synthetic peptide
  Seed: SIGKVCRTLLAKSVF
SIWKVQRKLLNKSVF

SEQ ID NO: 274540 - protein, 15 aa, Artificial Sequence
  Description of Artificial Sequence: Synthetic peptide
  Seed: SIGKVCRTLLAKSVF
SIWKVQRKLLPKSVF

SEQ ID NO: 274541 - protein, 15 aa, Artificial Sequence
  Description of Artificial Sequence: Synthetic peptide
  Seed: SIGKVCRTLLAKSVF
SIWKVQRKLLQKSVF

SEQ ID NO: 274542 - protein, 15 aa, Artificial Sequence
  Description of Artificial Sequence: Synthetic peptide
  Seed: SIGKVCRTLLAKSVF
SIWKVQRKLLRKSVF

SEQ ID NO: 274543 - protein, 15 aa, Artificial Sequence
  Description of Artificial Sequence: Synthetic peptide
  Seed: SIGKVCRTLLAKSVF
SIWKVQRKLLSKSVF

SEQ ID NO: 274544 - protein, 15 aa, Artificial Sequence
  Description of Artificial Sequence: Synthetic peptide
  Seed: SIGKVCRTLLAKSVF
SIWKVQRKLLTKSVF

SEQ ID NO: 274545 - protein, 15 aa, Artificial Sequence
  Description of Artificial Sequence: Synthetic peptide
  Seed: SIGKVCRTLLAKSVF
SIWKVQRKLLVKSVF

SEQ ID NO: 274546 - protein, 15 aa, Artificial Sequence
  Description of Artificial Sequence: Synthetic peptide
  Seed: SIGKVCRTLLAKSVF
SIWKVQRKLLYKSVF

SEQ ID NO: 274547 - protein, 15 aa, Artificial Sequence
  Description of Artificial Sequence: Synthetic peptide
  Seed: SIGKVCRTLLAKSVF
SIWKVQRNLLAKSVF

SEQ ID NO: 274548 - protein, 15 aa, Artificial Sequence
  Description of Artificial Sequence: Synthetic peptide
  Seed: SIGKVCRTLLAKSVF
SIWKVQRNLLSKSVF

SEQ ID NO: 274549 - protein, 15 aa, Artificial Sequence
  Description of Artificial Sequence: Synthetic peptide
  Seed: SIGKVCRTLLAKSVF
SIWKVQRRLLAKSVF

SEQ ID NO: 274550 - protein, 15 aa, Artificial Sequence
  Description of Artificial Sequence: Synthetic peptide
  Seed: SIGKVCRTLLAKSVF
SIWKVQRRLLCKSVF

SEQ ID NO: 274551 - protein, 15 aa, Artificial Sequence
  Description of Artificial Sequence: Synthetic peptide
  Seed: SIGKVCRTLLAKSVF
SIWKVQRRLLDKSVF

SEQ ID NO: 274552 - protein, 15 aa, Artificial Sequence
  Description of Artificial Sequence: Synthetic peptide
  Seed: SIGKVCRTLLAKSVF
SIWKVQRRLLEKSVF

SEQ ID NO: 274553 - protein, 15 aa, Artificial Sequence
  Description of Artificial Sequence: Synthetic peptide
  Seed: SIGKVCRTLLAKSVF
SIWKVQRRLLFKSVF

SEQ ID NO: 274554 - protein, 15 aa, Artificial Sequence
  Description of Artificial Sequence: Synthetic peptide
  Seed: SIGKVCRTLLAKSVF
SIWKVQRRLLGKSVF

SEQ ID NO: 274555 - protein, 15 aa, Artificial Sequence
  Description of Artificial Sequence: Synthetic peptide
  Seed: SIGKVCRTLLAKSVF
SIWKVQRRLLHKSVF

SEQ ID NO: 274556 - protein, 15 aa, Artificial Sequence
  Description of Artificial Sequence: Synthetic peptide
  Seed: SIGKVCRTLLAKSVF
SIWKVQRRLLIKSVF

SEQ ID NO: 274557 - protein, 15 aa, Artificial Sequence
  Description of Artificial Sequence: Synthetic peptide
  Seed: SIGKVCRTLLAKSVF
SIWKVQRRLLKKSVF

SEQ ID NO: 274558 - protein, 15 aa, Artificial Sequence
  Description of Artificial Sequence: Synthetic peptide
  Seed: SIGKVCRTLLAKSVF
SIWKVQRRLLLKSVF

SEQ ID NO: 274559 - protein, 15 aa, Artificial Sequence
  Description of Artificial Sequence: Synthetic peptide
  Seed: SIGKVCRTLLAKSVF
SIWKVQRRLLMKSVF

SEQ ID NO: 274560 - protein, 15 aa, Artificial Sequence
  Description of Artificial Sequence: Synthetic peptide
  Seed: SIGKVCRTLLAKSVF
SIWKVQRRLLNKSVF

SEQ ID NO: 274561 - protein, 15 aa, Artificial Sequence
  Description of Artificial Sequence: Synthetic peptide
  Seed: SIGKVCRTLLAKSVF
SIWKVQRRLLPKSVF

SEQ ID NO: 274562 - protein, 15 aa, Artificial Sequence
  Description of Artificial Sequence: Synthetic peptide
  Seed: SIGKVCRTLLAKSVF
SIWKVQRRLLQKSVF

SEQ ID NO: 274563 - protein, 15 aa, Artificial Sequence
  Description of Artificial Sequence: Synthetic peptide
  Seed: SIGKVCRTLLAKSVF
SIWKVQRRLLRKSVF

SEQ ID NO: 274564 - protein, 15 aa, Artificial Sequence
  Description of Artificial Sequence: Synthetic peptide
  Seed: SIGKVCRTLLAKSVF
SIWKVQRRLLSKSVF

SEQ ID NO: 274565 - protein, 15 aa, Artificial Sequence
  Description of Artificial Sequence: Synthetic peptide
  Seed: SIGKVCRTLLAKSVF
SIWKVQRRLLTKSVF

SEQ ID NO: 274566 - protein, 15 aa, Artificial Sequence
  Description of Artificial Sequence: Synthetic peptide
  Seed: SIGKVCRTLLAKSVF
SIWKVQRRLLVKSVF

SEQ ID NO: 274567 - protein, 15 aa, Artificial Sequence
  Description of Artificial Sequence: Synthetic peptide
  Seed: SIGKVCRTLLAKSVF
SIWKVQRRLLYKSVF

SEQ ID NO: 274568 - protein, 15 aa, Artificial Sequence
  Description of Artificial Sequence: Synthetic peptide
  Seed: SIGKVCRTLLAKSVF
SIWKVQRSLLAKSVF

SEQ ID NO: 274569 - protein, 15 aa, Artificial Sequence
  Description of Artificial Sequence: Synthetic peptide
  Seed: SIGKVCRTLLAKSVF
SIWKVQRSLLRKSVF

SEQ ID NO: 274570 - protein, 15 aa, Artificial Sequence
  Description of Artificial Sequence: Synthetic peptide
  Seed: SIGKVCRTLLAKSVF
SIWKVQRSLLSKSVF

SEQ ID NO: 274571 - protein, 15 aa, Artificial Sequence
  Description of Artificial Sequence: Synthetic peptide
  Seed: SIGKVCRTLLAKSVF
SIWKVQRTLLAKSVF

SEQ ID NO: 274572 - protein, 15 aa, Artificial Sequence
  Description of Artificial Sequence: Synthetic peptide
  Seed: SIGKVCRTLLAKSVF
SIWKVQRTLLDKSVF

SEQ ID NO: 274573 - protein, 15 aa, Artificial Sequence
  Description of Artificial Sequence: Synthetic peptide
  Seed: SIGKVCRTLLAKSVF
SIWKVQRTLLKKSVF

SEQ ID NO: 274574 - protein, 15 aa, Artificial Sequence
  Description of Artificial Sequence: Synthetic peptide
  Seed: SIGKVCRTLLAKSVF
SIWKVQRTLLRKSVF

SEQ ID NO: 274575 - protein, 15 aa, Artificial Sequence
  Description of Artificial Sequence: Synthetic peptide
  Seed: SIGKVCRTLLAKSVF
SIWKVQRTLLSKSVF

SEQ ID NO: 274576 - protein, 15 aa, Artificial Sequence
  Description of Artificial Sequence: Synthetic peptide
  Seed: SIGKVCRTLLAKSVF
SIWKVQRVLLRKSVF

SEQ ID NO: 274577 - protein, 15 aa, Artificial Sequence
  Description of Artificial Sequence: Synthetic peptide
  Seed: SIGKVCRTLLAKSVF
SIWKVRRALLRKSVF

SEQ ID NO: 274578 - protein, 15 aa, Artificial Sequence
  Description of Artificial Sequence: Synthetic peptide
  Seed: SIGKVCRTLLAKSVF
SIWKVRRKLLAKSVF

SEQ ID NO: 274579 - protein, 15 aa, Artificial Sequence
  Description of Artificial Sequence: Synthetic peptide
  Seed: SIGKVCRTLLAKSVF
SIWKVRRKLLGKSVF

SEQ ID NO: 274580 - protein, 15 aa, Artificial Sequence
  Description of Artificial Sequence: Synthetic peptide
  Seed: SIGKVCRTLLAKSVF
SIWKVRRKLLHKSVF

SEQ ID NO: 274581 - protein, 15 aa, Artificial Sequence
  Description of Artificial Sequence: Synthetic peptide
  Seed: SIGKVCRTLLAKSVF
SIWKVRRKLLMKSVF

SEQ ID NO: 274582 - protein, 15 aa, Artificial Sequence
  Description of Artificial Sequence: Synthetic peptide
  Seed: SIGKVCRTLLAKSVF
SIWKVRRKLLQKSVF

SEQ ID NO: 274583 - protein, 15 aa, Artificial Sequence
  Description of Artificial Sequence: Synthetic peptide
  Seed: SIGKVCRTLLAKSVF
SIWKVRRKLLSKSVF

SEQ ID NO: 274584 - protein, 15 aa, Artificial Sequence
  Description of Artificial Sequence: Synthetic peptide
  Seed: SIGKVCRTLLAKSVF
SIWKVRRKLLTKSVF

SEQ ID NO: 274585 - protein, 15 aa, Artificial Sequence
  Description of Artificial Sequence: Synthetic peptide
  Seed: SIGKVCRTLLAKSVF
SIWKVRRKLLVKSVF

SEQ ID NO: 274586 - protein, 15 aa, Artificial Sequence
  Description of Artificial Sequence: Synthetic peptide
  Seed: SIGKVCRTLLAKSVF
SIWKVRRKLLYKSVF

SEQ ID NO: 274587 - protein, 15 aa, Artificial Sequence
  Description of Artificial Sequence: Synthetic peptide
  Seed: SIGKVCRTLLAKSVF
SIWKVRRRLLAKSVF

SEQ ID NO: 274588 - protein, 15 aa, Artificial Sequence
  Description of Artificial Sequence: Synthetic peptide
  Seed: SIGKVCRTLLAKSVF
SIWKVRRRLLCKSVF

SEQ ID NO: 274589 - protein, 15 aa, Artificial Sequence
  Description of Artificial Sequence: Synthetic peptide
  Seed: SIGKVCRTLLAKSVF
SIWKVRRRLLGKSVF

SEQ ID NO: 274590 - protein, 15 aa, Artificial Sequence
  Description of Artificial Sequence: Synthetic peptide
  Seed: SIGKVCRTLLAKSVF
SIWKVRRRLLQKSVF

SEQ ID NO: 274591 - protein, 15 aa, Artificial Sequence
  Description of Artificial Sequence: Synthetic peptide
  Seed: SIGKVCRTLLAKSVF
SIWKVRRRLLSKSVF

SEQ ID NO: 274592 - protein, 15 aa, Artificial Sequence
  Description of Artificial Sequence: Synthetic peptide
  Seed: SIGKVCRTLLAKSVF
SIWKVRRSLLAKSVF

SEQ ID NO: 274593 - protein, 15 aa, Artificial Sequence
  Description of Artificial Sequence: Synthetic peptide
  Seed: SIGKVCRTLLAKSVF
SIWKVRRSLLGKSVF

SEQ ID NO: 274594 - protein, 15 aa, Artificial Sequence
  Description of Artificial Sequence: Synthetic peptide
  Seed: SIGKVCRTLLAKSVF
SIWKVRRSLLQKSVF

SEQ ID NO: 274595 - protein, 15 aa, Artificial Sequence
  Description of Artificial Sequence: Synthetic peptide
  Seed: SIGKVCRTLLAKSVF
SIWKVRRSLLSKSVF

SEQ ID NO: 274596 - protein, 15 aa, Artificial Sequence
  Description of Artificial Sequence: Synthetic peptide
  Seed: SIGKVCRTLLAKSVF
SIWKVRRTLLAKSVF

SEQ ID NO: 274597 - protein, 15 aa, Artificial Sequence
  Description of Artificial Sequence: Synthetic peptide
  Seed: SIGKVCRTLLAKSVF
SIWKVRRTLLGKSVF

SEQ ID NO: 274598 - protein, 15 aa, Artificial Sequence
  Description of Artificial Sequence: Synthetic peptide
  Seed: SIGKVCRTLLAKSVF
SIWKVRRTLLQKSVF

SEQ ID NO: 274599 - protein, 15 aa, Artificial Sequence
  Description of Artificial Sequence: Synthetic peptide
  Seed: SIGKVCRTLLAKSVF
SIWKVRRTLLRKSVF

SEQ ID NO: 274600 - protein, 15 aa, Artificial Sequence
  Description of Artificial Sequence: Synthetic peptide
  Seed: SIGKVCRTLLAKSVF
SIWKVRRTLLSKSVF

SEQ ID NO: 274601 - protein, 15 aa, Artificial Sequence
  Description of Artificial Sequence: Synthetic peptide
  Seed: SIGKVCRTLLAKSVF
SIWKVRRVLLGKSVF

SEQ ID NO: 274602 - protein, 15 aa, Artificial Sequence
  Description of Artificial Sequence: Synthetic peptide
  Seed: SIGKVCRTLLAKSVF
SIWKVRRVLLQKSVF

SEQ ID NO: 274603 - protein, 15 aa, Artificial Sequence
  Description of Artificial Sequence: Synthetic peptide
  Seed: SIGKVCRTLLAKSVF
SIWKVSRALLSKSVF

SEQ ID NO: 274604 - protein, 15 aa, Artificial Sequence
  Description of Artificial Sequence: Synthetic peptide
  Seed: SIGKVCRTLLAKSVF
SIWKVSRHLLSKSVF

SEQ ID NO: 274605 - protein, 15 aa, Artificial Sequence
  Description of Artificial Sequence: Synthetic peptide
  Seed: SIGKVCRTLLAKSVF
SIWKVSRKLLAKSVF

SEQ ID NO: 274606 - protein, 15 aa, Artificial Sequence
  Description of Artificial Sequence: Synthetic peptide
  Seed: SIGKVCRTLLAKSVF
SIWKVSRKLLGKSVF

SEQ ID NO: 274607 - protein, 15 aa, Artificial Sequence
  Description of Artificial Sequence: Synthetic peptide
  Seed: SIGKVCRTLLAKSVF
SIWKVSRKLLHKSVF

SEQ ID NO: 274608 - protein, 15 aa, Artificial Sequence
  Description of Artificial Sequence: Synthetic peptide
  Seed: SIGKVCRTLLAKSVF
SIWKVSRKLLKKSVF

SEQ ID NO: 274609 - protein, 15 aa, Artificial Sequence
  Description of Artificial Sequence: Synthetic peptide
  Seed: SIGKVCRTLLAKSVF
SIWKVSRKLLMKSVF

SEQ ID NO: 274610 - protein, 15 aa, Artificial Sequence
  Description of Artificial Sequence: Synthetic peptide
  Seed: SIGKVCRTLLAKSVF
SIWKVSRKLLNKSVF

SEQ ID NO: 274611 - protein, 15 aa, Artificial Sequence
  Description of Artificial Sequence: Synthetic peptide
  Seed: SIGKVCRTLLAKSVF
SIWKVSRKLLPKSVF

SEQ ID NO: 274612 - protein, 15 aa, Artificial Sequence
  Description of Artificial Sequence: Synthetic peptide
  Seed: SIGKVCRTLLAKSVF
SIWKVSRKLLQKSVF

SEQ ID NO: 274613 - protein, 15 aa, Artificial Sequence
  Description of Artificial Sequence: Synthetic peptide
  Seed: SIGKVCRTLLAKSVF
SIWKVSRKLLRKSVF

SEQ ID NO: 274614 - protein, 15 aa, Artificial Sequence
  Description of Artificial Sequence: Synthetic peptide
  Seed: SIGKVCRTLLAKSVF
SIWKVSRKLLSKSVF

SEQ ID NO: 274615 - protein, 15 aa, Artificial Sequence
  Description of Artificial Sequence: Synthetic peptide
  Seed: SIGKVCRTLLAKSVF
SIWKVSRKLLTKSVF

SEQ ID NO: 274616 - protein, 15 aa, Artificial Sequence
  Description of Artificial Sequence: Synthetic peptide
  Seed: SIGKVCRTLLAKSVF
SIWKVSRKLLVKSVF

SEQ ID NO: 274617 - protein, 15 aa, Artificial Sequence
  Description of Artificial Sequence: Synthetic peptide
  Seed: SIGKVCRTLLAKSVF
SIWKVSRKLLYKSVF

SEQ ID NO: 274618 - protein, 15 aa, Artificial Sequence
  Description of Artificial Sequence: Synthetic peptide
  Seed: SIGKVCRTLLAKSVF
SIWKVSRRLLAKSVF

SEQ ID NO: 274619 - protein, 15 aa, Artificial Sequence
  Description of Artificial Sequence: Synthetic peptide
  Seed: SIGKVCRTLLAKSVF
SIWKVSRRLLEKSVF

SEQ ID NO: 274620 - protein, 15 aa, Artificial Sequence
  Description of Artificial Sequence: Synthetic peptide
  Seed: SIGKVCRTLLAKSVF
SIWKVSRRLLFKSVF

SEQ ID NO: 274621 - protein, 15 aa, Artificial Sequence
  Description of Artificial Sequence: Synthetic peptide
  Seed: SIGKVCRTLLAKSVF
SIWKVSRRLLGKSVF

SEQ ID NO: 274622 - protein, 15 aa, Artificial Sequence
  Description of Artificial Sequence: Synthetic peptide
  Seed: SIGKVCRTLLAKSVF
SIWKVSRRLLHKSVF

SEQ ID NO: 274623 - protein, 15 aa, Artificial Sequence
  Description of Artificial Sequence: Synthetic peptide
  Seed: SIGKVCRTLLAKSVF
SIWKVSRRLLIKSVF

SEQ ID NO: 274624 - protein, 15 aa, Artificial Sequence
  Description of Artificial Sequence: Synthetic peptide
  Seed: SIGKVCRTLLAKSVF
SIWKVSRRLLKKSVF

SEQ ID NO: 274625 - protein, 15 aa, Artificial Sequence
  Description of Artificial Sequence: Synthetic peptide
  Seed: SIGKVCRTLLAKSVF
SIWKVSRRLLLKSVF

SEQ ID NO: 274626 - protein, 15 aa, Artificial Sequence
  Description of Artificial Sequence: Synthetic peptide
  Seed: SIGKVCRTLLAKSVF
SIWKVSRRLLMKSVF

SEQ ID NO: 274627 - protein, 15 aa, Artificial Sequence
  Description of Artificial Sequence: Synthetic peptide
  Seed: SIGKVCRTLLAKSVF
SIWKVSRRLLNKSVF

SEQ ID NO: 274628 - protein, 15 aa, Artificial Sequence
  Description of Artificial Sequence: Synthetic peptide
  Seed: SIGKVCRTLLAKSVF
SIWKVSRRLLPKSVF

SEQ ID NO: 274629 - protein, 15 aa, Artificial Sequence
  Description of Artificial Sequence: Synthetic peptide
  Seed: SIGKVCRTLLAKSVF
SIWKVSRRLLQKSVF

SEQ ID NO: 274630 - protein, 15 aa, Artificial Sequence
  Description of Artificial Sequence: Synthetic peptide
  Seed: SIGKVCRTLLAKSVF
SIWKVSRRLLRKSVF

SEQ ID NO: 274631 - protein, 15 aa, Artificial Sequence
  Description of Artificial Sequence: Synthetic peptide
  Seed: SIGKVCRTLLAKSVF
SIWKVSRRLLSKSVF

SEQ ID NO: 274632 - protein, 15 aa, Artificial Sequence
  Description of Artificial Sequence: Synthetic peptide
  Seed: SIGKVCRTLLAKSVF
SIWKVSRRLLTKSVF

SEQ ID NO: 274633 - protein, 15 aa, Artificial Sequence
  Description of Artificial Sequence: Synthetic peptide
  Seed: SIGKVCRTLLAKSVF
SIWKVSRRLLVKSVF

SEQ ID NO: 274634 - protein, 15 aa, Artificial Sequence
  Description of Artificial Sequence: Synthetic peptide
  Seed: SIGKVCRTLLAKSVF
SIWKVSRRLLYKSVF

SEQ ID NO: 274635 - protein, 15 aa, Artificial Sequence
  Description of Artificial Sequence: Synthetic peptide
  Seed: SIGKVCRTLLAKSVF
SIWKVSRSLLSKSVF

SEQ ID NO: 274636 - protein, 15 aa, Artificial Sequence
  Description of Artificial Sequence: Synthetic peptide
  Seed: SIGKVCRTLLAKSVF
SIWKVSRTLLAKSVF

SEQ ID NO: 274637 - protein, 15 aa, Artificial Sequence
  Description of Artificial Sequence: Synthetic peptide
  Seed: SIGKVCRTLLAKSVF
SIWKVSRTLLRKSVF

SEQ ID NO: 274638 - protein, 15 aa, Artificial Sequence
  Description of Artificial Sequence: Synthetic peptide
  Seed: SIGKVCRTLLAKSVF
SIWKVSRTLLSKSVF

SEQ ID NO: 274639 - protein, 15 aa, Artificial Sequence
  Description of Artificial Sequence: Synthetic peptide
  Seed: SIGKVCRTLLAKSVF
SIWKVTRHLLSKSVF

SEQ ID NO: 274640 - protein, 15 aa, Artificial Sequence
  Description of Artificial Sequence: Synthetic peptide
  Seed: SIGKVCRTLLAKSVF
SIWKVTRKLLAKSVF

SEQ ID NO: 274641 - protein, 15 aa, Artificial Sequence
  Description of Artificial Sequence: Synthetic peptide
  Seed: SIGKVCRTLLAKSVF
SIWKVTRKLLGKSVF

SEQ ID NO: 274642 - protein, 15 aa, Artificial Sequence
  Description of Artificial Sequence: Synthetic peptide
  Seed: SIGKVCRTLLAKSVF
SIWKVTRKLLHKSVF

SEQ ID NO: 274643 - protein, 15 aa, Artificial Sequence
  Description of Artificial Sequence: Synthetic peptide
  Seed: SIGKVCRTLLAKSVF
SIWKVTRKLLKKSVF

SEQ ID NO: 274644 - protein, 15 aa, Artificial Sequence
  Description of Artificial Sequence: Synthetic peptide
  Seed: SIGKVCRTLLAKSVF
SIWKVTRKLLMKSVF

SEQ ID NO: 274645 - protein, 15 aa, Artificial Sequence
  Description of Artificial Sequence: Synthetic peptide
  Seed: SIGKVCRTLLAKSVF
SIWKVTRKLLNKSVF

SEQ ID NO: 274646 - protein, 15 aa, Artificial Sequence
  Description of Artificial Sequence: Synthetic peptide
  Seed: SIGKVCRTLLAKSVF
SIWKVTRKLLPKSVF

SEQ ID NO: 274647 - protein, 15 aa, Artificial Sequence
  Description of Artificial Sequence: Synthetic peptide
  Seed: SIGKVCRTLLAKSVF
SIWKVTRKLLQKSVF

SEQ ID NO: 274648 - protein, 15 aa, Artificial Sequence
  Description of Artificial Sequence: Synthetic peptide
  Seed: SIGKVCRTLLAKSVF
SIWKVTRKLLRKSVF

SEQ ID NO: 274649 - protein, 15 aa, Artificial Sequence
  Description of Artificial Sequence: Synthetic peptide
  Seed: SIGKVCRTLLAKSVF
SIWKVTRKLLSKSVF

SEQ ID NO: 274650 - protein, 15 aa, Artificial Sequence
  Description of Artificial Sequence: Synthetic peptide
  Seed: SIGKVCRTLLAKSVF
SIWKVTRKLLTKSVF

SEQ ID NO: 274651 - protein, 15 aa, Artificial Sequence
  Description of Artificial Sequence: Synthetic peptide
  Seed: SIGKVCRTLLAKSVF
SIWKVTRKLLVKSVF

SEQ ID NO: 274652 - protein, 15 aa, Artificial Sequence
  Description of Artificial Sequence: Synthetic peptide
  Seed: SIGKVCRTLLAKSVF
SIWKVTRKLLYKSVF

SEQ ID NO: 274653 - protein, 15 aa, Artificial Sequence
  Description of Artificial Sequence: Synthetic peptide
  Seed: SIGKVCRTLLAKSVF
SIWKVTRRLLAKSVF

SEQ ID NO: 274654 - protein, 15 aa, Artificial Sequence
  Description of Artificial Sequence: Synthetic peptide
  Seed: SIGKVCRTLLAKSVF
SIWKVTRRLLEKSVF

SEQ ID NO: 274655 - protein, 15 aa, Artificial Sequence
  Description of Artificial Sequence: Synthetic peptide
  Seed: SIGKVCRTLLAKSVF
SIWKVTRRLLGKSVF

SEQ ID NO: 274656 - protein, 15 aa, Artificial Sequence
  Description of Artificial Sequence: Synthetic peptide
  Seed: SIGKVCRTLLAKSVF
SIWKVTRRLLHKSVF

SEQ ID NO: 274657 - protein, 15 aa, Artificial Sequence
  Description of Artificial Sequence: Synthetic peptide
  Seed: SIGKVCRTLLAKSVF
SIWKVTRRLLIKSVF

SEQ ID NO: 274658 - protein, 15 aa, Artificial Sequence
  Description of Artificial Sequence: Synthetic peptide
  Seed: SIGKVCRTLLAKSVF
SIWKVTRRLLKKSVF

SEQ ID NO: 274659 - protein, 15 aa, Artificial Sequence
  Description of Artificial Sequence: Synthetic peptide
  Seed: SIGKVCRTLLAKSVF
SIWKVTRRLLLKSVF

SEQ ID NO: 274660 - protein, 15 aa, Artificial Sequence
  Description of Artificial Sequence: Synthetic peptide
  Seed: SIGKVCRTLLAKSVF
SIWKVTRRLLMKSVF

SEQ ID NO: 274661 - protein, 15 aa, Artificial Sequence
  Description of Artificial Sequence: Synthetic peptide
  Seed: SIGKVCRTLLAKSVF
SIWKVTRRLLNKSVF

SEQ ID NO: 274662 - protein, 15 aa, Artificial Sequence
  Description of Artificial Sequence: Synthetic peptide
  Seed: SIGKVCRTLLAKSVF
SIWKVTRRLLPKSVF

SEQ ID NO: 274663 - protein, 15 aa, Artificial Sequence
  Description of Artificial Sequence: Synthetic peptide
  Seed: SIGKVCRTLLAKSVF
SIWKVTRRLLQKSVF

SEQ ID NO: 274664 - protein, 15 aa, Artificial Sequence
  Description of Artificial Sequence: Synthetic peptide
  Seed: SIGKVCRTLLAKSVF
SIWKVTRRLLRKSVF

SEQ ID NO: 274665 - protein, 15 aa, Artificial Sequence
  Description of Artificial Sequence: Synthetic peptide
  Seed: SIGKVCRTLLAKSVF
SIWKVTRRLLSKSVF

SEQ ID NO: 274666 - protein, 15 aa, Artificial Sequence
  Description of Artificial Sequence: Synthetic peptide
  Seed: SIGKVCRTLLAKSVF
SIWKVTRRLLTKSVF

SEQ ID NO: 274667 - protein, 15 aa, Artificial Sequence
  Description of Artificial Sequence: Synthetic peptide
  Seed: SIGKVCRTLLAKSVF
SIWKVTRRLLVKSVF

SEQ ID NO: 274668 - protein, 15 aa, Artificial Sequence
  Description of Artificial Sequence: Synthetic peptide
  Seed: SIGKVCRTLLAKSVF
SIWKVTRRLLYKSVF

SEQ ID NO: 274669 - protein, 15 aa, Artificial Sequence
  Description of Artificial Sequence: Synthetic peptide
  Seed: SIGKVCRTLLAKSVF
SIWKVTRSLLSKSVF

SEQ ID NO: 274670 - protein, 15 aa, Artificial Sequence
  Description of Artificial Sequence: Synthetic peptide
  Seed: SIGKVCRTLLAKSVF
SIWKVTRTLLRKSVF

SEQ ID NO: 274671 - protein, 15 aa, Artificial Sequence
  Description of Artificial Sequence: Synthetic peptide
  Seed: SIGKVCRTLLAKSVF
SIWKVTRTLLSKSVF

SEQ ID NO: 274672 - protein, 15 aa, Artificial Sequence
  Description of Artificial Sequence: Synthetic peptide
  Seed: SIGKVCRTLLAKSVF
SIWKVTRVLLRKSVF

SEQ ID NO: 274673 - protein, 15 aa, Artificial Sequence
  Description of Artificial Sequence: Synthetic peptide
  Seed: SIGKVCRTLLAKSVF
SIWKVVRALLKKSVF

SEQ ID NO: 274674 - protein, 15 aa, Artificial Sequence
  Description of Artificial Sequence: Synthetic peptide
  Seed: SIGKVCRTLLAKSVF
SIWKVVRALLRKSVF

SEQ ID NO: 274675 - protein, 15 aa, Artificial Sequence
  Description of Artificial Sequence: Synthetic peptide
  Seed: SIGKVCRTLLAKSVF
SIWKVVRHLLAKSVF

SEQ ID NO: 274676 - protein, 15 aa, Artificial Sequence
  Description of Artificial Sequence: Synthetic peptide
  Seed: SIGKVCRTLLAKSVF
SIWKVVRHLLGKSVF

SEQ ID NO: 274677 - protein, 15 aa, Artificial Sequence
  Description of Artificial Sequence: Synthetic peptide
  Seed: SIGKVCRTLLAKSVF
SIWKVVRHLLHKSVF

SEQ ID NO: 274678 - protein, 15 aa, Artificial Sequence
  Description of Artificial Sequence: Synthetic peptide
  Seed: SIGKVCRTLLAKSVF
SIWKVVRHLLRKSVF

SEQ ID NO: 274679 - protein, 15 aa, Artificial Sequence
  Description of Artificial Sequence: Synthetic peptide
  Seed: SIGKVCRTLLAKSVF
SIWKVVRHLLSKSVF

SEQ ID NO: 274680 - protein, 15 aa, Artificial Sequence
  Description of Artificial Sequence: Synthetic peptide
  Seed: SIGKVCRTLLAKSVF
SIWKVVRKLLAKSVF

SEQ ID NO: 274681 - protein, 15 aa, Artificial Sequence
  Description of Artificial Sequence: Synthetic peptide
  Seed: SIGKVCRTLLAKSVF
SIWKVVRKLLEKSVF

SEQ ID NO: 274682 - protein, 15 aa, Artificial Sequence
  Description of Artificial Sequence: Synthetic peptide
  Seed: SIGKVCRTLLAKSVF
SIWKVVRKLLGKSVF

SEQ ID NO: 274683 - protein, 15 aa, Artificial Sequence
  Description of Artificial Sequence: Synthetic peptide
  Seed: SIGKVCRTLLAKSVF
SIWKVVRKLLHKSVF

SEQ ID NO: 274684 - protein, 15 aa, Artificial Sequence
  Description of Artificial Sequence: Synthetic peptide
  Seed: SIGKVCRTLLAKSVF
SIWKVVRKLLKKSVF

SEQ ID NO: 274685 - protein, 15 aa, Artificial Sequence
  Description of Artificial Sequence: Synthetic peptide
  Seed: SIGKVCRTLLAKSVF
SIWKVVRKLLMKSVF

SEQ ID NO: 274686 - protein, 15 aa, Artificial Sequence
  Description of Artificial Sequence: Synthetic peptide
  Seed: SIGKVCRTLLAKSVF
SIWKVVRKLLNKSVF

SEQ ID NO: 274687 - protein, 15 aa, Artificial Sequence
  Description of Artificial Sequence: Synthetic peptide
  Seed: SIGKVCRTLLAKSVF
SIWKVVRKLLPKSVF

SEQ ID NO: 274688 - protein, 15 aa, Artificial Sequence
  Description of Artificial Sequence: Synthetic peptide
  Seed: SIGKVCRTLLAKSVF
SIWKVVRKLLQKSVF

SEQ ID NO: 274689 - protein, 15 aa, Artificial Sequence
  Description of Artificial Sequence: Synthetic peptide
  Seed: SIGKVCRTLLAKSVF
SIWKVVRKLLRKSVF

SEQ ID NO: 274690 - protein, 15 aa, Artificial Sequence
  Description of Artificial Sequence: Synthetic peptide
  Seed: SIGKVCRTLLAKSVF
SIWKVVRKLLSKSVF

SEQ ID NO: 274691 - protein, 15 aa, Artificial Sequence
  Description of Artificial Sequence: Synthetic peptide
  Seed: SIGKVCRTLLAKSVF
SIWKVVRKLLTKSVF

SEQ ID NO: 274692 - protein, 15 aa, Artificial Sequence
  Description of Artificial Sequence: Synthetic peptide
  Seed: SIGKVCRTLLAKSVF
SIWKVVRKLLVKSVF

SEQ ID NO: 274693 - protein, 15 aa, Artificial Sequence
  Description of Artificial Sequence: Synthetic peptide
  Seed: SIGKVCRTLLAKSVF
SIWKVVRKLLYKSVF

SEQ ID NO: 274694 - protein, 15 aa, Artificial Sequence
  Description of Artificial Sequence: Synthetic peptide
  Seed: SIGKVCRTLLAKSVF
SIWKVVRNLLAKSVF

SEQ ID NO: 274695 - protein, 15 aa, Artificial Sequence
  Description of Artificial Sequence: Synthetic peptide
  Seed: SIGKVCRTLLAKSVF
SIWKVVRNLLDKSVF

SEQ ID NO: 274696 - protein, 15 aa, Artificial Sequence
  Description of Artificial Sequence: Synthetic peptide
  Seed: SIGKVCRTLLAKSVF
SIWKVVRNLLEKSVF

SEQ ID NO: 274697 - protein, 15 aa, Artificial Sequence
  Description of Artificial Sequence: Synthetic peptide
  Seed: SIGKVCRTLLAKSVF
SIWKVVRNLLSKSVF

SEQ ID NO: 274698 - protein, 15 aa, Artificial Sequence
  Description of Artificial Sequence: Synthetic peptide
  Seed: SIGKVCRTLLAKSVF
SIWKVVRPLLAKSVF

SEQ ID NO: 274699 - protein, 15 aa, Artificial Sequence
  Description of Artificial Sequence: Synthetic peptide
  Seed: SIGKVCRTLLAKSVF
SIWKVVRPLLGKSVF

SEQ ID NO: 274700 - protein, 15 aa, Artificial Sequence
  Description of Artificial Sequence: Synthetic peptide
  Seed: SIGKVCRTLLAKSVF
SIWKVVRPLLRKSVF

SEQ ID NO: 274701 - protein, 15 aa, Artificial Sequence
  Description of Artificial Sequence: Synthetic peptide
  Seed: SIGKVCRTLLAKSVF
SIWKVVRPLLSKSVF

SEQ ID NO: 274702 - protein, 15 aa, Artificial Sequence
  Description of Artificial Sequence: Synthetic peptide
  Seed: SIGKVCRTLLAKSVF
SIWKVVRRLLAKSVF

SEQ ID NO: 274703 - protein, 15 aa, Artificial Sequence
  Description of Artificial Sequence: Synthetic peptide
  Seed: SIGKVCRTLLAKSVF
SIWKVVRRLLDKSVF

SEQ ID NO: 274704 - protein, 15 aa, Artificial Sequence
  Description of Artificial Sequence: Synthetic peptide
  Seed: SIGKVCRTLLAKSVF
SIWKVVRRLLEKSVF

SEQ ID NO: 274705 - protein, 15 aa, Artificial Sequence
  Description of Artificial Sequence: Synthetic peptide
  Seed: SIGKVCRTLLAKSVF
SIWKVVRRLLGKSVF

SEQ ID NO: 274706 - protein, 15 aa, Artificial Sequence
  Description of Artificial Sequence: Synthetic peptide
  Seed: SIGKVCRTLLAKSVF
SIWKVVRRLLHKSVF

SEQ ID NO: 274707 - protein, 15 aa, Artificial Sequence
  Description of Artificial Sequence: Synthetic peptide
  Seed: SIGKVCRTLLAKSVF
SIWKVVRRLLKKSVF

SEQ ID NO: 274708 - protein, 15 aa, Artificial Sequence
  Description of Artificial Sequence: Synthetic peptide
  Seed: SIGKVCRTLLAKSVF
SIWKVVRRLLMKSVF

SEQ ID NO: 274709 - protein, 15 aa, Artificial Sequence
  Description of Artificial Sequence: Synthetic peptide
  Seed: SIGKVCRTLLAKSVF
SIWKVVRRLLNKSVF

SEQ ID NO: 274710 - protein, 15 aa, Artificial Sequence
  Description of Artificial Sequence: Synthetic peptide
  Seed: SIGKVCRTLLAKSVF
SIWKVVRRLLPKSVF

SEQ ID NO: 274711 - protein, 15 aa, Artificial Sequence
  Description of Artificial Sequence: Synthetic peptide
  Seed: SIGKVCRTLLAKSVF
SIWKVVRRLLQKSVF

SEQ ID NO: 274712 - protein, 15 aa, Artificial Sequence
  Description of Artificial Sequence: Synthetic peptide
  Seed: SIGKVCRTLLAKSVF
SIWKVVRRLLRKSVF

SEQ ID NO: 274713 - protein, 15 aa, Artificial Sequence
  Description of Artificial Sequence: Synthetic peptide
  Seed: SIGKVCRTLLAKSVF
SIWKVVRRLLSKSVF

SEQ ID NO: 274714 - protein, 15 aa, Artificial Sequence
  Description of Artificial Sequence: Synthetic peptide
  Seed: SIGKVCRTLLAKSVF
SIWKVVRRLLTKSVF

SEQ ID NO: 274715 - protein, 15 aa, Artificial Sequence
  Description of Artificial Sequence: Synthetic peptide
  Seed: SIGKVCRTLLAKSVF
SIWKVVRRLLVKSVF

SEQ ID NO: 274716 - protein, 15 aa, Artificial Sequence
  Description of Artificial Sequence: Synthetic peptide
  Seed: SIGKVCRTLLAKSVF
SIWKVVRRLLYKSVF

SEQ ID NO: 274717 - protein, 15 aa, Artificial Sequence
  Description of Artificial Sequence: Synthetic peptide
  Seed: SIGKVCRTLLAKSVF
SIWKVVRSLLDKSVF

SEQ ID NO: 274718 - protein, 15 aa, Artificial Sequence
  Description of Artificial Sequence: Synthetic peptide
  Seed: SIGKVCRTLLAKSVF
SIWKVVRSLLHKSVF

SEQ ID NO: 274719 - protein, 15 aa, Artificial Sequence
  Description of Artificial Sequence: Synthetic peptide
  Seed: SIGKVCRTLLAKSVF
SIWKVVRSLLKKSVF

SEQ ID NO: 274720 - protein, 15 aa, Artificial Sequence
  Description of Artificial Sequence: Synthetic peptide
  Seed: SIGKVCRTLLAKSVF
SIWKVVRSLLRKSVF

SEQ ID NO: 274721 - protein, 15 aa, Artificial Sequence
  Description of Artificial Sequence: Synthetic peptide
  Seed: SIGKVCRTLLAKSVF
SIWKVVRSLLSKSVF

SEQ ID NO: 274722 - protein, 15 aa, Artificial Sequence
  Description of Artificial Sequence: Synthetic peptide
  Seed: SIGKVCRTLLAKSVF
SIWKVVRTLLAKSVF

SEQ ID NO: 274723 - protein, 15 aa, Artificial Sequence
  Description of Artificial Sequence: Synthetic peptide
  Seed: SIGKVCRTLLAKSVF
SIWKVVRTLLDKSVF

SEQ ID NO: 274724 - protein, 15 aa, Artificial Sequence
  Description of Artificial Sequence: Synthetic peptide
  Seed: SIGKVCRTLLAKSVF
SIWKVVRTLLEKSVF

SEQ ID NO: 274725 - protein, 15 aa, Artificial Sequence
  Description of Artificial Sequence: Synthetic peptide
  Seed: SIGKVCRTLLAKSVF
SIWKVVRTLLHKSVF

SEQ ID NO: 274726 - protein, 15 aa, Artificial Sequence
  Description of Artificial Sequence: Synthetic peptide
  Seed: SIGKVCRTLLAKSVF
SIWKVVRTLLKKSVF

SEQ ID NO: 274727 - protein, 15 aa, Artificial Sequence
  Description of Artificial Sequence: Synthetic peptide
  Seed: SIGKVCRTLLAKSVF
SIWKVVRTLLRKSVF

SEQ ID NO: 274728 - protein, 15 aa, Artificial Sequence
  Description of Artificial Sequence: Synthetic peptide
  Seed: SIGKVCRTLLAKSVF
SIWKVVRTLLSKSVF

SEQ ID NO: 274729 - protein, 15 aa, Artificial Sequence
  Description of Artificial Sequence: Synthetic peptide
  Seed: SIGKVCRTLLAKSVF
SIWKVWRALLRKSVF

SEQ ID NO: 274730 - protein, 15 aa, Artificial Sequence
  Description of Artificial Sequence: Synthetic peptide
  Seed: SIGKVCRTLLAKSVF
SIWKVWRGLLRKSVF

SEQ ID NO: 274731 - protein, 15 aa, Artificial Sequence
  Description of Artificial Sequence: Synthetic peptide
  Seed: SIGKVCRTLLAKSVF
SIWKVWRHLLKKSVF

SEQ ID NO: 274732 - protein, 15 aa, Artificial Sequence
  Description of Artificial Sequence: Synthetic peptide
  Seed: SIGKVCRTLLAKSVF
SIWKVWRHLLRKSVF

SEQ ID NO: 274733 - protein, 15 aa, Artificial Sequence
  Description of Artificial Sequence: Synthetic peptide
  Seed: SIGKVCRTLLAKSVF
SIWKVWRKLLAKSVF

SEQ ID NO: 274734 - protein, 15 aa, Artificial Sequence
  Description of Artificial Sequence: Synthetic peptide
  Seed: SIGKVCRTLLAKSVF
SIWKVWRKLLGKSVF

SEQ ID NO: 274735 - protein, 15 aa, Artificial Sequence
  Description of Artificial Sequence: Synthetic peptide
  Seed: SIGKVCRTLLAKSVF
SIWKVWRKLLHKSVF

SEQ ID NO: 274736 - protein, 15 aa, Artificial Sequence
  Description of Artificial Sequence: Synthetic peptide
  Seed: SIGKVCRTLLAKSVF
SIWKVWRKLLKKSVF

SEQ ID NO: 274737 - protein, 15 aa, Artificial Sequence
  Description of Artificial Sequence: Synthetic peptide
  Seed: SIGKVCRTLLAKSVF
SIWKVWRKLLMKSVF

SEQ ID NO: 274738 - protein, 15 aa, Artificial Sequence
  Description of Artificial Sequence: Synthetic peptide
  Seed: SIGKVCRTLLAKSVF
SIWKVWRKLLNKSVF

SEQ ID NO: 274739 - protein, 15 aa, Artificial Sequence
  Description of Artificial Sequence: Synthetic peptide
  Seed: SIGKVCRTLLAKSVF
SIWKVWRKLLQKSVF

SEQ ID NO: 274740 - protein, 15 aa, Artificial Sequence
  Description of Artificial Sequence: Synthetic peptide
  Seed: SIGKVCRTLLAKSVF
SIWKVWRKLLRKSVF

SEQ ID NO: 274741 - protein, 15 aa, Artificial Sequence
  Description of Artificial Sequence: Synthetic peptide
  Seed: SIGKVCRTLLAKSVF
SIWKVWRKLLSKSVF

SEQ ID NO: 274742 - protein, 15 aa, Artificial Sequence
  Description of Artificial Sequence: Synthetic peptide
  Seed: SIGKVCRTLLAKSVF
SIWKVWRKLLTKSVF

SEQ ID NO: 274743 - protein, 15 aa, Artificial Sequence
  Description of Artificial Sequence: Synthetic peptide
  Seed: SIGKVCRTLLAKSVF
SIWKVWRKLLVKSVF

SEQ ID NO: 274744 - protein, 15 aa, Artificial Sequence
  Description of Artificial Sequence: Synthetic peptide
  Seed: SIGKVCRTLLAKSVF
SIWKVWRNLLRKSVF

SEQ ID NO: 274745 - protein, 15 aa, Artificial Sequence
  Description of Artificial Sequence: Synthetic peptide
  Seed: SIGKVCRTLLAKSVF
SIWKVWRPLLRKSVF

SEQ ID NO: 274746 - protein, 15 aa, Artificial Sequence
  Description of Artificial Sequence: Synthetic peptide
  Seed: SIGKVCRTLLAKSVF
SIWKVWRRLLAKSVF

SEQ ID NO: 274747 - protein, 15 aa, Artificial Sequence
  Description of Artificial Sequence: Synthetic peptide
  Seed: SIGKVCRTLLAKSVF
SIWKVWRRLLGKSVF

SEQ ID NO: 274748 - protein, 15 aa, Artificial Sequence
  Description of Artificial Sequence: Synthetic peptide
  Seed: SIGKVCRTLLAKSVF
SIWKVWRRLLHKSVF

SEQ ID NO: 274749 - protein, 15 aa, Artificial Sequence
  Description of Artificial Sequence: Synthetic peptide
  Seed: SIGKVCRTLLAKSVF
SIWKVWRRLLKKSVF

SEQ ID NO: 274750 - protein, 15 aa, Artificial Sequence
  Description of Artificial Sequence: Synthetic peptide
  Seed: SIGKVCRTLLAKSVF
SIWKVWRRLLMKSVF

SEQ ID NO: 274751 - protein, 15 aa, Artificial Sequence
  Description of Artificial Sequence: Synthetic peptide
  Seed: SIGKVCRTLLAKSVF
SIWKVWRRLLNKSVF

SEQ ID NO: 274752 - protein, 15 aa, Artificial Sequence
  Description of Artificial Sequence: Synthetic peptide
  Seed: SIGKVCRTLLAKSVF
SIWKVWRRLLPKSVF

SEQ ID NO: 274753 - protein, 15 aa, Artificial Sequence
  Description of Artificial Sequence: Synthetic peptide
  Seed: SIGKVCRTLLAKSVF
SIWKVWRRLLQKSVF

SEQ ID NO: 274754 - protein, 15 aa, Artificial Sequence
  Description of Artificial Sequence: Synthetic peptide
  Seed: SIGKVCRTLLAKSVF
SIWKVWRRLLRKSVF

SEQ ID NO: 274755 - protein, 15 aa, Artificial Sequence
  Description of Artificial Sequence: Synthetic peptide
  Seed: SIGKVCRTLLAKSVF
SIWKVWRRLLSKSVF

SEQ ID NO: 274756 - protein, 15 aa, Artificial Sequence
  Description of Artificial Sequence: Synthetic peptide
  Seed: SIGKVCRTLLAKSVF
SIWKVWRRLLTKSVF

SEQ ID NO: 274757 - protein, 15 aa, Artificial Sequence
  Description of Artificial Sequence: Synthetic peptide
  Seed: SIGKVCRTLLAKSVF
SIWKVWRRLLVKSVF

SEQ ID NO: 274758 - protein, 15 aa, Artificial Sequence
  Description of Artificial Sequence: Synthetic peptide
  Seed: SIGKVCRTLLAKSVF
SIWKVWRRLLYKSVF

SEQ ID NO: 274759 - protein, 15 aa, Artificial Sequence
  Description of Artificial Sequence: Synthetic peptide
  Seed: SIGKVCRTLLAKSVF
SIWKVWRSLLRKSVF

SEQ ID NO: 274760 - protein, 15 aa, Artificial Sequence
  Description of Artificial Sequence: Synthetic peptide
  Seed: SIGKVCRTLLAKSVF
SIWKVWRTLLRKSVF

SEQ ID NO: 274761 - protein, 15 aa, Artificial Sequence
  Description of Artificial Sequence: Synthetic peptide
  Seed: SIGKVCRTLLAKSVF
SIWKVYRHLLRKSVF

SEQ ID NO: 274762 - protein, 15 aa, Artificial Sequence
  Description of Artificial Sequence: Synthetic peptide
  Seed: SIGKVCRTLLAKSVF
SIWKVYRKLLAKSVF

SEQ ID NO: 274763 - protein, 15 aa, Artificial Sequence
  Description of Artificial Sequence: Synthetic peptide
  Seed: SIGKVCRTLLAKSVF
SIWKVYRKLLGKSVF

SEQ ID NO: 274764 - protein, 15 aa, Artificial Sequence
  Description of Artificial Sequence: Synthetic peptide
  Seed: SIGKVCRTLLAKSVF
SIWKVYRKLLHKSVF

SEQ ID NO: 274765 - protein, 15 aa, Artificial Sequence
  Description of Artificial Sequence: Synthetic peptide
  Seed: SIGKVCRTLLAKSVF
SIWKVYRKLLKKSVF

SEQ ID NO: 274766 - protein, 15 aa, Artificial Sequence
  Description of Artificial Sequence: Synthetic peptide
  Seed: SIGKVCRTLLAKSVF
SIWKVYRKLLQKSVF

SEQ ID NO: 274767 - protein, 15 aa, Artificial Sequence
  Description of Artificial Sequence: Synthetic peptide
  Seed: SIGKVCRTLLAKSVF
SIWKVYRKLLRKSVF

SEQ ID NO: 274768 - protein, 15 aa, Artificial Sequence
  Description of Artificial Sequence: Synthetic peptide
  Seed: SIGKVCRTLLAKSVF
SIWKVYRKLLSKSVF

SEQ ID NO: 274769 - protein, 15 aa, Artificial Sequence
  Description of Artificial Sequence: Synthetic peptide
  Seed: SIGKVCRTLLAKSVF
SIWKVYRQLLRKSVF

SEQ ID NO: 274770 - protein, 15 aa, Artificial Sequence
  Description of Artificial Sequence: Synthetic peptide
  Seed: SIGKVCRTLLAKSVF
SIWKVYRRLLAKSVF

SEQ ID NO: 274771 - protein, 15 aa, Artificial Sequence
  Description of Artificial Sequence: Synthetic peptide
  Seed: SIGKVCRTLLAKSVF
SIWKVYRRLLGKSVF

SEQ ID NO: 274772 - protein, 15 aa, Artificial Sequence
  Description of Artificial Sequence: Synthetic peptide
  Seed: SIGKVCRTLLAKSVF
SIWKVYRRLLHKSVF

SEQ ID NO: 274773 - protein, 15 aa, Artificial Sequence
  Description of Artificial Sequence: Synthetic peptide
  Seed: SIGKVCRTLLAKSVF
SIWKVYRRLLKKSVF

SEQ ID NO: 274774 - protein, 15 aa, Artificial Sequence
  Description of Artificial Sequence: Synthetic peptide
  Seed: SIGKVCRTLLAKSVF
SIWKVYRRLLMKSVF

SEQ ID NO: 274775 - protein, 15 aa, Artificial Sequence
  Description of Artificial Sequence: Synthetic peptide
  Seed: SIGKVCRTLLAKSVF
SIWKVYRRLLNKSVF

SEQ ID NO: 274776 - protein, 15 aa, Artificial Sequence
  Description of Artificial Sequence: Synthetic peptide
  Seed: SIGKVCRTLLAKSVF
SIWKVYRRLLPKSVF

SEQ ID NO: 274777 - protein, 15 aa, Artificial Sequence
  Description of Artificial Sequence: Synthetic peptide
  Seed: SIGKVCRTLLAKSVF
SIWKVYRRLLQKSVF

SEQ ID NO: 274778 - protein, 15 aa, Artificial Sequence
  Description of Artificial Sequence: Synthetic peptide
  Seed: SIGKVCRTLLAKSVF
SIWKVYRRLLRKSVF

SEQ ID NO: 274779 - protein, 15 aa, Artificial Sequence
  Description of Artificial Sequence: Synthetic peptide
  Seed: SIGKVCRTLLAKSVF
SIWKVYRRLLSKSVF

SEQ ID NO: 274780 - protein, 15 aa, Artificial Sequence
  Description of Artificial Sequence: Synthetic peptide
  Seed: SIGKVCRTLLAKSVF
SIWKVYRRLLTKSVF

SEQ ID NO: 274781 - protein, 15 aa, Artificial Sequence
  Description of Artificial Sequence: Synthetic peptide
  Seed: SIGKVCRTLLAKSVF
SIWKVYRRLLVKSVF

SEQ ID NO: 274782 - protein, 15 aa, Artificial Sequence
  Description of Artificial Sequence: Synthetic peptide
  Seed: SIGKVCRTLLAKSVF
SIWKVYRRLLYKSVF

SEQ ID NO: 274783 - protein, 15 aa, Artificial Sequence
  Description of Artificial Sequence: Synthetic peptide
  Seed: SIGKVCRTLLAKSVF
SIWKVYRTLLRKSVF

SEQ ID NO: 274784 - protein, 15 aa, Artificial Sequence
  Description of Artificial Sequence: Synthetic peptide
  Seed: SIGKVCRTLLAKSVF
SIYKVARALLAKSVF

SEQ ID NO: 274785 - protein, 15 aa, Artificial Sequence
  Description of Artificial Sequence: Synthetic peptide
  Seed: SIGKVCRTLLAKSVF
SIYKVARALLDKSVF

SEQ ID NO: 274786 - protein, 15 aa, Artificial Sequence
  Description of Artificial Sequence: Synthetic peptide
  Seed: SIGKVCRTLLAKSVF
SIYKVARALLEKSVF

SEQ ID NO: 274787 - protein, 15 aa, Artificial Sequence
  Description of Artificial Sequence: Synthetic peptide
  Seed: SIGKVCRTLLAKSVF
SIYKVARALLGKSVF

SEQ ID NO: 274788 - protein, 15 aa, Artificial Sequence
  Description of Artificial Sequence: Synthetic peptide
  Seed: SIGKVCRTLLAKSVF
SIYKVARALLHKSVF

SEQ ID NO: 274789 - protein, 15 aa, Artificial Sequence
  Description of Artificial Sequence: Synthetic peptide
  Seed: SIGKVCRTLLAKSVF
SIYKVARALLIKSVF

SEQ ID NO: 274790 - protein, 15 aa, Artificial Sequence
  Description of Artificial Sequence: Synthetic peptide
  Seed: SIGKVCRTLLAKSVF
SIYKVARALLKKSVF

SEQ ID NO: 274791 - protein, 15 aa, Artificial Sequence
  Description of Artificial Sequence: Synthetic peptide
  Seed: SIGKVCRTLLAKSVF
SIYKVARALLMKSVF

SEQ ID NO: 274792 - protein, 15 aa, Artificial Sequence
  Description of Artificial Sequence: Synthetic peptide
  Seed: SIGKVCRTLLAKSVF
SIYKVARALLNKSVF

SEQ ID NO: 274793 - protein, 15 aa, Artificial Sequence
  Description of Artificial Sequence: Synthetic peptide
  Seed: SIGKVCRTLLAKSVF
SIYKVARALLPKSVF

SEQ ID NO: 274794 - protein, 15 aa, Artificial Sequence
  Description of Artificial Sequence: Synthetic peptide
  Seed: SIGKVCRTLLAKSVF
SIYKVARALLQKSVF

SEQ ID NO: 274795 - protein, 15 aa, Artificial Sequence
  Description of Artificial Sequence: Synthetic peptide
  Seed: SIGKVCRTLLAKSVF
SIYKVARALLRKSVF

SEQ ID NO: 274796 - protein, 15 aa, Artificial Sequence
  Description of Artificial Sequence: Synthetic peptide
  Seed: SIGKVCRTLLAKSVF
SIYKVARALLSKSVF

SEQ ID NO: 274797 - protein, 15 aa, Artificial Sequence
  Description of Artificial Sequence: Synthetic peptide
  Seed: SIGKVCRTLLAKSVF
SIYKVARALLTKSVF

SEQ ID NO: 274798 - protein, 15 aa, Artificial Sequence
  Description of Artificial Sequence: Synthetic peptide
  Seed: SIGKVCRTLLAKSVF
SIYKVARALLVKSVF

SEQ ID NO: 274799 - protein, 15 aa, Artificial Sequence
  Description of Artificial Sequence: Synthetic peptide
  Seed: SIGKVCRTLLAKSVF
SIYKVARDLLAKSVF

SEQ ID NO: 274800 - protein, 15 aa, Artificial Sequence
  Description of Artificial Sequence: Synthetic peptide
  Seed: SIGKVCRTLLAKSVF
SIYKVARDLLDKSVF

SEQ ID NO: 274801 - protein, 15 aa, Artificial Sequence
  Description of Artificial Sequence: Synthetic peptide
  Seed: SIGKVCRTLLAKSVF
SIYKVARDLLSKSVF

SEQ ID NO: 274802 - protein, 15 aa, Artificial Sequence
  Description of Artificial Sequence: Synthetic peptide
  Seed: SIGKVCRTLLAKSVF
SIYKVARGLLAKSVF

SEQ ID NO: 274803 - protein, 15 aa, Artificial Sequence
  Description of Artificial Sequence: Synthetic peptide
  Seed: SIGKVCRTLLAKSVF
SIYKVARGLLDKSVF

SEQ ID NO: 274804 - protein, 15 aa, Artificial Sequence
  Description of Artificial Sequence: Synthetic peptide
  Seed: SIGKVCRTLLAKSVF
SIYKVARGLLGKSVF

SEQ ID NO: 274805 - protein, 15 aa, Artificial Sequence
  Description of Artificial Sequence: Synthetic peptide
  Seed: SIGKVCRTLLAKSVF
SIYKVARGLLHKSVF

SEQ ID NO: 274806 - protein, 15 aa, Artificial Sequence
  Description of Artificial Sequence: Synthetic peptide
  Seed: SIGKVCRTLLAKSVF
SIYKVARGLLKKSVF

SEQ ID NO: 274807 - protein, 15 aa, Artificial Sequence
  Description of Artificial Sequence: Synthetic peptide
  Seed: SIGKVCRTLLAKSVF
SIYKVARGLLNKSVF

SEQ ID NO: 274808 - protein, 15 aa, Artificial Sequence
  Description of Artificial Sequence: Synthetic peptide
  Seed: SIGKVCRTLLAKSVF
SIYKVARGLLQKSVF

SEQ ID NO: 274809 - protein, 15 aa, Artificial Sequence
  Description of Artificial Sequence: Synthetic peptide
  Seed: SIGKVCRTLLAKSVF
SIYKVARGLLRKSVF

SEQ ID NO: 274810 - protein, 15 aa, Artificial Sequence
  Description of Artificial Sequence: Synthetic peptide
  Seed: SIGKVCRTLLAKSVF
SIYKVARGLLSKSVF

SEQ ID NO: 274811 - protein, 15 aa, Artificial Sequence
  Description of Artificial Sequence: Synthetic peptide
  Seed: SIGKVCRTLLAKSVF
SIYKVARGLLTKSVF

SEQ ID NO: 274812 - protein, 15 aa, Artificial Sequence
  Description of Artificial Sequence: Synthetic peptide
  Seed: SIGKVCRTLLAKSVF
SIYKVARGLLVKSVF

SEQ ID NO: 274813 - protein, 15 aa, Artificial Sequence
  Description of Artificial Sequence: Synthetic peptide
  Seed: SIGKVCRTLLAKSVF
SIYKVARHLLAKSVF

SEQ ID NO: 274814 - protein, 15 aa, Artificial Sequence
  Description of Artificial Sequence: Synthetic peptide
  Seed: SIGKVCRTLLAKSVF
SIYKVARHLLGKSVF

SEQ ID NO: 274815 - protein, 15 aa, Artificial Sequence
  Description of Artificial Sequence: Synthetic peptide
  Seed: SIGKVCRTLLAKSVF
SIYKVARHLLHKSVF

SEQ ID NO: 274816 - protein, 15 aa, Artificial Sequence
  Description of Artificial Sequence: Synthetic peptide
  Seed: SIGKVCRTLLAKSVF
SIYKVARHLLIKSVF

SEQ ID NO: 274817 - protein, 15 aa, Artificial Sequence
  Description of Artificial Sequence: Synthetic peptide
  Seed: SIGKVCRTLLAKSVF
SIYKVARHLLKKSVF

SEQ ID NO: 274818 - protein, 15 aa, Artificial Sequence
  Description of Artificial Sequence: Synthetic peptide
  Seed: SIGKVCRTLLAKSVF
SIYKVARHLLLKSVF

SEQ ID NO: 274819 - protein, 15 aa, Artificial Sequence
  Description of Artificial Sequence: Synthetic peptide
  Seed: SIGKVCRTLLAKSVF
SIYKVARHLLMKSVF

SEQ ID NO: 274820 - protein, 15 aa, Artificial Sequence
  Description of Artificial Sequence: Synthetic peptide
  Seed: SIGKVCRTLLAKSVF
SIYKVARHLLNKSVF

SEQ ID NO: 274821 - protein, 15 aa, Artificial Sequence
  Description of Artificial Sequence: Synthetic peptide
  Seed: SIGKVCRTLLAKSVF
SIYKVARHLLPKSVF

SEQ ID NO: 274822 - protein, 15 aa, Artificial Sequence
  Description of Artificial Sequence: Synthetic peptide
  Seed: SIGKVCRTLLAKSVF
SIYKVARHLLQKSVF

SEQ ID NO: 274823 - protein, 15 aa, Artificial Sequence
  Description of Artificial Sequence: Synthetic peptide
  Seed: SIGKVCRTLLAKSVF
SIYKVARHLLRKSVF

SEQ ID NO: 274824 - protein, 15 aa, Artificial Sequence
  Description of Artificial Sequence: Synthetic peptide
  Seed: SIGKVCRTLLAKSVF
SIYKVARHLLSKSVF

SEQ ID NO: 274825 - protein, 15 aa, Artificial Sequence
  Description of Artificial Sequence: Synthetic peptide
  Seed: SIGKVCRTLLAKSVF
SIYKVARHLLTKSVF

SEQ ID NO: 274826 - protein, 15 aa, Artificial Sequence
  Description of Artificial Sequence: Synthetic peptide
  Seed: SIGKVCRTLLAKSVF
SIYKVARHLLVKSVF

SEQ ID NO: 274827 - protein, 15 aa, Artificial Sequence
  Description of Artificial Sequence: Synthetic peptide
  Seed: SIGKVCRTLLAKSVF
SIYKVARHLLYKSVF

SEQ ID NO: 274828 - protein, 15 aa, Artificial Sequence
  Description of Artificial Sequence: Synthetic peptide
  Seed: SIGKVCRTLLAKSVF
SIYKVARILLAKSVF

SEQ ID NO: 274829 - protein, 15 aa, Artificial Sequence
  Description of Artificial Sequence: Synthetic peptide
  Seed: SIGKVCRTLLAKSVF
SIYKVARILLDKSVF

SEQ ID NO: 274830 - protein, 15 aa, Artificial Sequence
  Description of Artificial Sequence: Synthetic peptide
  Seed: SIGKVCRTLLAKSVF
SIYKVARILLHKSVF

SEQ ID NO: 274831 - protein, 15 aa, Artificial Sequence
  Description of Artificial Sequence: Synthetic peptide
  Seed: SIGKVCRTLLAKSVF
SIYKVARILLKKSVF

SEQ ID NO: 274832 - protein, 15 aa, Artificial Sequence
  Description of Artificial Sequence: Synthetic peptide
  Seed: SIGKVCRTLLAKSVF
SIYKVARILLRKSVF

SEQ ID NO: 274833 - protein, 15 aa, Artificial Sequence
  Description of Artificial Sequence: Synthetic peptide
  Seed: SIGKVCRTLLAKSVF
SIYKVARILLSKSVF

SEQ ID NO: 274834 - protein, 15 aa, Artificial Sequence
  Description of Artificial Sequence: Synthetic peptide
  Seed: SIGKVCRTLLAKSVF
SIYKVARKLLAKSVF

SEQ ID NO: 274835 - protein, 15 aa, Artificial Sequence
  Description of Artificial Sequence: Synthetic peptide
  Seed: SIGKVCRTLLAKSVF
SIYKVARKLLCKSVF

SEQ ID NO: 274836 - protein, 15 aa, Artificial Sequence
  Description of Artificial Sequence: Synthetic peptide
  Seed: SIGKVCRTLLAKSVF
SIYKVARKLLDKSVF

SEQ ID NO: 274837 - protein, 15 aa, Artificial Sequence
  Description of Artificial Sequence: Synthetic peptide
  Seed: SIGKVCRTLLAKSVF
SIYKVARKLLEKSVF

SEQ ID NO: 274838 - protein, 15 aa, Artificial Sequence
  Description of Artificial Sequence: Synthetic peptide
  Seed: SIGKVCRTLLAKSVF
SIYKVARKLLFKSVF

SEQ ID NO: 274839 - protein, 15 aa, Artificial Sequence
  Description of Artificial Sequence: Synthetic peptide
  Seed: SIGKVCRTLLAKSVF
SIYKVARKLLGKSVF

SEQ ID NO: 274840 - protein, 15 aa, Artificial Sequence
  Description of Artificial Sequence: Synthetic peptide
  Seed: SIGKVCRTLLAKSVF
SIYKVARKLLHKSVF

SEQ ID NO: 274841 - protein, 15 aa, Artificial Sequence
  Description of Artificial Sequence: Synthetic peptide
  Seed: SIGKVCRTLLAKSVF
SIYKVARKLLIKSVF

SEQ ID NO: 274842 - protein, 15 aa, Artificial Sequence
  Description of Artificial Sequence: Synthetic peptide
  Seed: SIGKVCRTLLAKSVF
SIYKVARKLLKKSVF

SEQ ID NO: 274843 - protein, 15 aa, Artificial Sequence
  Description of Artificial Sequence: Synthetic peptide
  Seed: SIGKVCRTLLAKSVF
SIYKVARKLLLKSVF

SEQ ID NO: 274844 - protein, 15 aa, Artificial Sequence
  Description of Artificial Sequence: Synthetic peptide
  Seed: SIGKVCRTLLAKSVF
SIYKVARKLLMKSVF

SEQ ID NO: 274845 - protein, 15 aa, Artificial Sequence
  Description of Artificial Sequence: Synthetic peptide
  Seed: SIGKVCRTLLAKSVF
SIYKVARKLLNKSVF

SEQ ID NO: 274846 - protein, 15 aa, Artificial Sequence
  Description of Artificial Sequence: Synthetic peptide
  Seed: SIGKVCRTLLAKSVF
SIYKVARKLLPKSVF

SEQ ID NO: 274847 - protein, 15 aa, Artificial Sequence
  Description of Artificial Sequence: Synthetic peptide
  Seed: SIGKVCRTLLAKSVF
SIYKVARKLLQKSVF

SEQ ID NO: 274848 - protein, 15 aa, Artificial Sequence
  Description of Artificial Sequence: Synthetic peptide
  Seed: SIGKVCRTLLAKSVF
SIYKVARKLLRKSVF

SEQ ID NO: 274849 - protein, 15 aa, Artificial Sequence
  Description of Artificial Sequence: Synthetic peptide
  Seed: SIGKVCRTLLAKSVF
SIYKVARKLLSKSVF

SEQ ID NO: 274850 - protein, 15 aa, Artificial Sequence
  Description of Artificial Sequence: Synthetic peptide
  Seed: SIGKVCRTLLAKSVF
SIYKVARKLLTKSVF

SEQ ID NO: 274851 - protein, 15 aa, Artificial Sequence
  Description of Artificial Sequence: Synthetic peptide
  Seed: SIGKVCRTLLAKSVF
SIYKVARKLLVKSVF

SEQ ID NO: 274852 - protein, 15 aa, Artificial Sequence
  Description of Artificial Sequence: Synthetic peptide
  Seed: SIGKVCRTLLAKSVF
SIYKVARKLLWKSVF

SEQ ID NO: 274853 - protein, 15 aa, Artificial Sequence
  Description of Artificial Sequence: Synthetic peptide
  Seed: SIGKVCRTLLAKSVF
SIYKVARKLLYKSVF

SEQ ID NO: 274854 - protein, 15 aa, Artificial Sequence
  Description of Artificial Sequence: Synthetic peptide
  Seed: SIGKVCRTLLAKSVF
SIYKVARMLLHKSVF

SEQ ID NO: 274855 - protein, 15 aa, Artificial Sequence
  Description of Artificial Sequence: Synthetic peptide
  Seed: SIGKVCRTLLAKSVF
SIYKVARMLLRKSVF

SEQ ID NO: 274856 - protein, 15 aa, Artificial Sequence
  Description of Artificial Sequence: Synthetic peptide
  Seed: SIGKVCRTLLAKSVF
SIYKVARNLLAKSVF

SEQ ID NO: 274857 - protein, 15 aa, Artificial Sequence
  Description of Artificial Sequence: Synthetic peptide
  Seed: SIGKVCRTLLAKSVF
SIYKVARNLLDKSVF

SEQ ID NO: 274858 - protein, 15 aa, Artificial Sequence
  Description of Artificial Sequence: Synthetic peptide
  Seed: SIGKVCRTLLAKSVF
SIYKVARNLLEKSVF

SEQ ID NO: 274859 - protein, 15 aa, Artificial Sequence
  Description of Artificial Sequence: Synthetic peptide
  Seed: SIGKVCRTLLAKSVF
SIYKVARNLLGKSVF

SEQ ID NO: 274860 - protein, 15 aa, Artificial Sequence
  Description of Artificial Sequence: Synthetic peptide
  Seed: SIGKVCRTLLAKSVF
SIYKVARNLLHKSVF

SEQ ID NO: 274861 - protein, 15 aa, Artificial Sequence
  Description of Artificial Sequence: Synthetic peptide
  Seed: SIGKVCRTLLAKSVF
SIYKVARNLLIKSVF

SEQ ID NO: 274862 - protein, 15 aa, Artificial Sequence
  Description of Artificial Sequence: Synthetic peptide
  Seed: SIGKVCRTLLAKSVF
SIYKVARNLLKKSVF

SEQ ID NO: 274863 - protein, 15 aa, Artificial Sequence
  Description of Artificial Sequence: Synthetic peptide
  Seed: SIGKVCRTLLAKSVF
SIYKVARNLLLKSVF

SEQ ID NO: 274864 - protein, 15 aa, Artificial Sequence
  Description of Artificial Sequence: Synthetic peptide
  Seed: SIGKVCRTLLAKSVF
SIYKVARNLLMKSVF

SEQ ID NO: 274865 - protein, 15 aa, Artificial Sequence
  Description of Artificial Sequence: Synthetic peptide
  Seed: SIGKVCRTLLAKSVF
SIYKVARNLLNKSVF

SEQ ID NO: 274866 - protein, 15 aa, Artificial Sequence
  Description of Artificial Sequence: Synthetic peptide
  Seed: SIGKVCRTLLAKSVF
SIYKVARNLLPKSVF

SEQ ID NO: 274867 - protein, 15 aa, Artificial Sequence
  Description of Artificial Sequence: Synthetic peptide
  Seed: SIGKVCRTLLAKSVF
SIYKVARNLLQKSVF

SEQ ID NO: 274868 - protein, 15 aa, Artificial Sequence
  Description of Artificial Sequence: Synthetic peptide
  Seed: SIGKVCRTLLAKSVF
SIYKVARNLLRKSVF

SEQ ID NO: 274869 - protein, 15 aa, Artificial Sequence
  Description of Artificial Sequence: Synthetic peptide
  Seed: SIGKVCRTLLAKSVF
SIYKVARNLLSKSVF

SEQ ID NO: 274870 - protein, 15 aa, Artificial Sequence
  Description of Artificial Sequence: Synthetic peptide
  Seed: SIGKVCRTLLAKSVF
SIYKVARNLLTKSVF

SEQ ID NO: 274871 - protein, 15 aa, Artificial Sequence
  Description of Artificial Sequence: Synthetic peptide
  Seed: SIGKVCRTLLAKSVF
SIYKVARNLLVKSVF

SEQ ID NO: 274872 - protein, 15 aa, Artificial Sequence
  Description of Artificial Sequence: Synthetic peptide
  Seed: SIGKVCRTLLAKSVF
SIYKVARPLLAKSVF

SEQ ID NO: 274873 - protein, 15 aa, Artificial Sequence
  Description of Artificial Sequence: Synthetic peptide
  Seed: SIGKVCRTLLAKSVF
SIYKVARPLLDKSVF

SEQ ID NO: 274874 - protein, 15 aa, Artificial Sequence
  Description of Artificial Sequence: Synthetic peptide
  Seed: SIGKVCRTLLAKSVF
SIYKVARPLLGKSVF

SEQ ID NO: 274875 - protein, 15 aa, Artificial Sequence
  Description of Artificial Sequence: Synthetic peptide
  Seed: SIGKVCRTLLAKSVF
SIYKVARPLLHKSVF

SEQ ID NO: 274876 - protein, 15 aa, Artificial Sequence
  Description of Artificial Sequence: Synthetic peptide
  Seed: SIGKVCRTLLAKSVF
SIYKVARPLLIKSVF

SEQ ID NO: 274877 - protein, 15 aa, Artificial Sequence
  Description of Artificial Sequence: Synthetic peptide
  Seed: SIGKVCRTLLAKSVF
SIYKVARPLLKKSVF

SEQ ID NO: 274878 - protein, 15 aa, Artificial Sequence
  Description of Artificial Sequence: Synthetic peptide
  Seed: SIGKVCRTLLAKSVF
SIYKVARPLLMKSVF

SEQ ID NO: 274879 - protein, 15 aa, Artificial Sequence
  Description of Artificial Sequence: Synthetic peptide
  Seed: SIGKVCRTLLAKSVF
SIYKVARPLLNKSVF

SEQ ID NO: 274880 - protein, 15 aa, Artificial Sequence
  Description of Artificial Sequence: Synthetic peptide
  Seed: SIGKVCRTLLAKSVF
SIYKVARPLLQKSVF

SEQ ID NO: 274881 - protein, 15 aa, Artificial Sequence
  Description of Artificial Sequence: Synthetic peptide
  Seed: SIGKVCRTLLAKSVF
SIYKVARPLLRKSVF

SEQ ID NO: 274882 - protein, 15 aa, Artificial Sequence
  Description of Artificial Sequence: Synthetic peptide
  Seed: SIGKVCRTLLAKSVF
SIYKVARPLLSKSVF

SEQ ID NO: 274883 - protein, 15 aa, Artificial Sequence
  Description of Artificial Sequence: Synthetic peptide
  Seed: SIGKVCRTLLAKSVF
SIYKVARPLLTKSVF

SEQ ID NO: 274884 - protein, 15 aa, Artificial Sequence
  Description of Artificial Sequence: Synthetic peptide
  Seed: SIGKVCRTLLAKSVF
SIYKVARPLLVKSVF

SEQ ID NO: 274885 - protein, 15 aa, Artificial Sequence
  Description of Artificial Sequence: Synthetic peptide
  Seed: SIGKVCRTLLAKSVF
SIYKVARQLLAKSVF

SEQ ID NO: 274886 - protein, 15 aa, Artificial Sequence
  Description of Artificial Sequence: Synthetic peptide
  Seed: SIGKVCRTLLAKSVF
SIYKVARQLLGKSVF

SEQ ID NO: 274887 - protein, 15 aa, Artificial Sequence
  Description of Artificial Sequence: Synthetic peptide
  Seed: SIGKVCRTLLAKSVF
SIYKVARQLLHKSVF

SEQ ID NO: 274888 - protein, 15 aa, Artificial Sequence
  Description of Artificial Sequence: Synthetic peptide
  Seed: SIGKVCRTLLAKSVF
SIYKVARQLLKKSVF

SEQ ID NO: 274889 - protein, 15 aa, Artificial Sequence
  Description of Artificial Sequence: Synthetic peptide
  Seed: SIGKVCRTLLAKSVF
SIYKVARQLLNKSVF

SEQ ID NO: 274890 - protein, 15 aa, Artificial Sequence
  Description of Artificial Sequence: Synthetic peptide
  Seed: SIGKVCRTLLAKSVF
SIYKVARQLLQKSVF

SEQ ID NO: 274891 - protein, 15 aa, Artificial Sequence
  Description of Artificial Sequence: Synthetic peptide
  Seed: SIGKVCRTLLAKSVF
SIYKVARQLLRKSVF

SEQ ID NO: 274892 - protein, 15 aa, Artificial Sequence
  Description of Artificial Sequence: Synthetic peptide
  Seed: SIGKVCRTLLAKSVF
SIYKVARQLLSKSVF

SEQ ID NO: 274893 - protein, 15 aa, Artificial Sequence
  Description of Artificial Sequence: Synthetic peptide
  Seed: SIGKVCRTLLAKSVF
SIYKVARQLLTKSVF

SEQ ID NO: 274894 - protein, 15 aa, Artificial Sequence
  Description of Artificial Sequence: Synthetic peptide
  Seed: SIGKVCRTLLAKSVF
SIYKVARRLLAKSVF

SEQ ID NO: 274895 - protein, 15 aa, Artificial Sequence
  Description of Artificial Sequence: Synthetic peptide
  Seed: SIGKVCRTLLAKSVF
SIYKVARRLLCKSVF

SEQ ID NO: 274896 - protein, 15 aa, Artificial Sequence
  Description of Artificial Sequence: Synthetic peptide
  Seed: SIGKVCRTLLAKSVF
SIYKVARRLLDKSVF

SEQ ID NO: 274897 - protein, 15 aa, Artificial Sequence
  Description of Artificial Sequence: Synthetic peptide
  Seed: SIGKVCRTLLAKSVF
SIYKVARRLLEKSVF

SEQ ID NO: 274898 - protein, 15 aa, Artificial Sequence
  Description of Artificial Sequence: Synthetic peptide
  Seed: SIGKVCRTLLAKSVF
SIYKVARRLLFKSVF

SEQ ID NO: 274899 - protein, 15 aa, Artificial Sequence
  Description of Artificial Sequence: Synthetic peptide
  Seed: SIGKVCRTLLAKSVF
SIYKVARRLLGKSVF

SEQ ID NO: 274900 - protein, 15 aa, Artificial Sequence
  Description of Artificial Sequence: Synthetic peptide
  Seed: SIGKVCRTLLAKSVF
SIYKVARRLLHKSVF

SEQ ID NO: 274901 - protein, 15 aa, Artificial Sequence
  Description of Artificial Sequence: Synthetic peptide
  Seed: SIGKVCRTLLAKSVF
SIYKVARRLLIKSVF

SEQ ID NO: 274902 - protein, 15 aa, Artificial Sequence
  Description of Artificial Sequence: Synthetic peptide
  Seed: SIGKVCRTLLAKSVF
SIYKVARRLLKKSVF

SEQ ID NO: 274903 - protein, 15 aa, Artificial Sequence
  Description of Artificial Sequence: Synthetic peptide
  Seed: SIGKVCRTLLAKSVF
SIYKVARRLLLKSVF

SEQ ID NO: 274904 - protein, 15 aa, Artificial Sequence
  Description of Artificial Sequence: Synthetic peptide
  Seed: SIGKVCRTLLAKSVF
SIYKVARRLLMKSVF

SEQ ID NO: 274905 - protein, 15 aa, Artificial Sequence
  Description of Artificial Sequence: Synthetic peptide
  Seed: SIGKVCRTLLAKSVF
SIYKVARRLLNKSVF

SEQ ID NO: 274906 - protein, 15 aa, Artificial Sequence
  Description of Artificial Sequence: Synthetic peptide
  Seed: SIGKVCRTLLAKSVF
SIYKVARRLLPKSVF

SEQ ID NO: 274907 - protein, 15 aa, Artificial Sequence
  Description of Artificial Sequence: Synthetic peptide
  Seed: SIGKVCRTLLAKSVF
SIYKVARRLLQKSVF

SEQ ID NO: 274908 - protein, 15 aa, Artificial Sequence
  Description of Artificial Sequence: Synthetic peptide
  Seed: SIGKVCRTLLAKSVF
SIYKVARRLLRKSVF

SEQ ID NO: 274909 - protein, 15 aa, Artificial Sequence
  Description of Artificial Sequence: Synthetic peptide
  Seed: SIGKVCRTLLAKSVF
SIYKVARRLLSKSVF

SEQ ID NO: 274910 - protein, 15 aa, Artificial Sequence
  Description of Artificial Sequence: Synthetic peptide
  Seed: SIGKVCRTLLAKSVF
SIYKVARRLLTKSVF

SEQ ID NO: 274911 - protein, 15 aa, Artificial Sequence
  Description of Artificial Sequence: Synthetic peptide
  Seed: SIGKVCRTLLAKSVF
SIYKVARRLLVKSVF

SEQ ID NO: 274912 - protein, 15 aa, Artificial Sequence
  Description of Artificial Sequence: Synthetic peptide
  Seed: SIGKVCRTLLAKSVF
SIYKVARRLLWKSVF

SEQ ID NO: 274913 - protein, 15 aa, Artificial Sequence
  Description of Artificial Sequence: Synthetic peptide
  Seed: SIGKVCRTLLAKSVF
SIYKVARRLLYKSVF

SEQ ID NO: 274914 - protein, 15 aa, Artificial Sequence
  Description of Artificial Sequence: Synthetic peptide
  Seed: SIGKVCRTLLAKSVF
SIYKVARSLLAKSVF

SEQ ID NO: 274915 - protein, 15 aa, Artificial Sequence
  Description of Artificial Sequence: Synthetic peptide
  Seed: SIGKVCRTLLAKSVF
SIYKVARSLLDKSVF

SEQ ID NO: 274916 - protein, 15 aa, Artificial Sequence
  Description of Artificial Sequence: Synthetic peptide
  Seed: SIGKVCRTLLAKSVF
SIYKVARSLLEKSVF

SEQ ID NO: 274917 - protein, 15 aa, Artificial Sequence
  Description of Artificial Sequence: Synthetic peptide
  Seed: SIGKVCRTLLAKSVF
SIYKVARSLLHKSVF

SEQ ID NO: 274918 - protein, 15 aa, Artificial Sequence
  Description of Artificial Sequence: Synthetic peptide
  Seed: SIGKVCRTLLAKSVF
SIYKVARSLLIKSVF

SEQ ID NO: 274919 - protein, 15 aa, Artificial Sequence
  Description of Artificial Sequence: Synthetic peptide
  Seed: SIGKVCRTLLAKSVF
SIYKVARSLLKKSVF

SEQ ID NO: 274920 - protein, 15 aa, Artificial Sequence
  Description of Artificial Sequence: Synthetic peptide
  Seed: SIGKVCRTLLAKSVF
SIYKVARSLLLKSVF

SEQ ID NO: 274921 - protein, 15 aa, Artificial Sequence
  Description of Artificial Sequence: Synthetic peptide
  Seed: SIGKVCRTLLAKSVF
SIYKVARSLLMKSVF

SEQ ID NO: 274922 - protein, 15 aa, Artificial Sequence
  Description of Artificial Sequence: Synthetic peptide
  Seed: SIGKVCRTLLAKSVF
SIYKVARSLLNKSVF

SEQ ID NO: 274923 - protein, 15 aa, Artificial Sequence
  Description of Artificial Sequence: Synthetic peptide
  Seed: SIGKVCRTLLAKSVF
SIYKVARSLLPKSVF

SEQ ID NO: 274924 - protein, 15 aa, Artificial Sequence
  Description of Artificial Sequence: Synthetic peptide
  Seed: SIGKVCRTLLAKSVF
SIYKVARSLLQKSVF

SEQ ID NO: 274925 - protein, 15 aa, Artificial Sequence
  Description of Artificial Sequence: Synthetic peptide
  Seed: SIGKVCRTLLAKSVF
SIYKVARSLLRKSVF

SEQ ID NO: 274926 - protein, 15 aa, Artificial Sequence
  Description of Artificial Sequence: Synthetic peptide
  Seed: SIGKVCRTLLAKSVF
SIYKVARSLLSKSVF

SEQ ID NO: 274927 - protein, 15 aa, Artificial Sequence
  Description of Artificial Sequence: Synthetic peptide
  Seed: SIGKVCRTLLAKSVF
SIYKVARSLLTKSVF

SEQ ID NO: 274928 - protein, 15 aa, Artificial Sequence
  Description of Artificial Sequence: Synthetic peptide
  Seed: SIGKVCRTLLAKSVF
SIYKVARSLLVKSVF

SEQ ID NO: 274929 - protein, 15 aa, Artificial Sequence
  Description of Artificial Sequence: Synthetic peptide
  Seed: SIGKVCRTLLAKSVF
SIYKVARSLLYKSVF

SEQ ID NO: 274930 - protein, 15 aa, Artificial Sequence
  Description of Artificial Sequence: Synthetic peptide
  Seed: SIGKVCRTLLAKSVF
SIYKVARTLLAKSVF

SEQ ID NO: 274931 - protein, 15 aa, Artificial Sequence
  Description of Artificial Sequence: Synthetic peptide
  Seed: SIGKVCRTLLAKSVF
SIYKVARTLLDKSVF

SEQ ID NO: 274932 - protein, 15 aa, Artificial Sequence
  Description of Artificial Sequence: Synthetic peptide
  Seed: SIGKVCRTLLAKSVF
SIYKVARTLLEKSVF

SEQ ID NO: 274933 - protein, 15 aa, Artificial Sequence
  Description of Artificial Sequence: Synthetic peptide
  Seed: SIGKVCRTLLAKSVF
SIYKVARTLLGKSVF

SEQ ID NO: 274934 - protein, 15 aa, Artificial Sequence
  Description of Artificial Sequence: Synthetic peptide
  Seed: SIGKVCRTLLAKSVF
SIYKVARTLLHKSVF

SEQ ID NO: 274935 - protein, 15 aa, Artificial Sequence
  Description of Artificial Sequence: Synthetic peptide
  Seed: SIGKVCRTLLAKSVF
SIYKVARTLLIKSVF

SEQ ID NO: 274936 - protein, 15 aa, Artificial Sequence
  Description of Artificial Sequence: Synthetic peptide
  Seed: SIGKVCRTLLAKSVF
SIYKVARTLLKKSVF

SEQ ID NO: 274937 - protein, 15 aa, Artificial Sequence
  Description of Artificial Sequence: Synthetic peptide
  Seed: SIGKVCRTLLAKSVF
SIYKVARTLLLKSVF

SEQ ID NO: 274938 - protein, 15 aa, Artificial Sequence
  Description of Artificial Sequence: Synthetic peptide
  Seed: SIGKVCRTLLAKSVF
SIYKVARTLLMKSVF

SEQ ID NO: 274939 - protein, 15 aa, Artificial Sequence
  Description of Artificial Sequence: Synthetic peptide
  Seed: SIGKVCRTLLAKSVF
SIYKVARTLLNKSVF

SEQ ID NO: 274940 - protein, 15 aa, Artificial Sequence
  Description of Artificial Sequence: Synthetic peptide
  Seed: SIGKVCRTLLAKSVF
SIYKVARTLLPKSVF

SEQ ID NO: 274941 - protein, 15 aa, Artificial Sequence
  Description of Artificial Sequence: Synthetic peptide
  Seed: SIGKVCRTLLAKSVF
SIYKVARTLLQKSVF

SEQ ID NO: 274942 - protein, 15 aa, Artificial Sequence
  Description of Artificial Sequence: Synthetic peptide
  Seed: SIGKVCRTLLAKSVF
SIYKVARTLLRKSVF

SEQ ID NO: 274943 - protein, 15 aa, Artificial Sequence
  Description of Artificial Sequence: Synthetic peptide
  Seed: SIGKVCRTLLAKSVF
SIYKVARTLLSKSVF

SEQ ID NO: 274944 - protein, 15 aa, Artificial Sequence
  Description of Artificial Sequence: Synthetic peptide
  Seed: SIGKVCRTLLAKSVF
SIYKVARTLLTKSVF

SEQ ID NO: 274945 - protein, 15 aa, Artificial Sequence
  Description of Artificial Sequence: Synthetic peptide
  Seed: SIGKVCRTLLAKSVF
SIYKVARTLLVKSVF

SEQ ID NO: 274946 - protein, 15 aa, Artificial Sequence
  Description of Artificial Sequence: Synthetic peptide
  Seed: SIGKVCRTLLAKSVF
SIYKVARTLLYKSVF

SEQ ID NO: 274947 - protein, 15 aa, Artificial Sequence
  Description of Artificial Sequence: Synthetic peptide
  Seed: SIGKVCRTLLAKSVF
SIYKVARVLLAKSVF

SEQ ID NO: 274948 - protein, 15 aa, Artificial Sequence
  Description of Artificial Sequence: Synthetic peptide
  Seed: SIGKVCRTLLAKSVF
SIYKVARVLLDKSVF

SEQ ID NO: 274949 - protein, 15 aa, Artificial Sequence
  Description of Artificial Sequence: Synthetic peptide
  Seed: SIGKVCRTLLAKSVF
SIYKVARVLLEKSVF

SEQ ID NO: 274950 - protein, 15 aa, Artificial Sequence
  Description of Artificial Sequence: Synthetic peptide
  Seed: SIGKVCRTLLAKSVF
SIYKVARVLLGKSVF

SEQ ID NO: 274951 - protein, 15 aa, Artificial Sequence
  Description of Artificial Sequence: Synthetic peptide
  Seed: SIGKVCRTLLAKSVF
SIYKVARVLLHKSVF

SEQ ID NO: 274952 - protein, 15 aa, Artificial Sequence
  Description of Artificial Sequence: Synthetic peptide
  Seed: SIGKVCRTLLAKSVF
SIYKVARVLLKKSVF

SEQ ID NO: 274953 - protein, 15 aa, Artificial Sequence
  Description of Artificial Sequence: Synthetic peptide
  Seed: SIGKVCRTLLAKSVF
SIYKVARVLLNKSVF

SEQ ID NO: 274954 - protein, 15 aa, Artificial Sequence
  Description of Artificial Sequence: Synthetic peptide
  Seed: SIGKVCRTLLAKSVF
SIYKVARVLLQKSVF

SEQ ID NO: 274955 - protein, 15 aa, Artificial Sequence
  Description of Artificial Sequence: Synthetic peptide
  Seed: SIGKVCRTLLAKSVF
SIYKVARVLLRKSVF

SEQ ID NO: 274956 - protein, 15 aa, Artificial Sequence
  Description of Artificial Sequence: Synthetic peptide
  Seed: SIGKVCRTLLAKSVF
SIYKVARVLLSKSVF

SEQ ID NO: 274957 - protein, 15 aa, Artificial Sequence
  Description of Artificial Sequence: Synthetic peptide
  Seed: SIGKVCRTLLAKSVF
SIYKVARVLLTKSVF

SEQ ID NO: 274958 - protein, 15 aa, Artificial Sequence
  Description of Artificial Sequence: Synthetic peptide
  Seed: SIGKVCRTLLAKSVF
SIYKVCRALLAKSVF

SEQ ID NO: 274959 - protein, 15 aa, Artificial Sequence
  Description of Artificial Sequence: Synthetic peptide
  Seed: SIGKVCRTLLAKSVF
SIYKVCRALLGKSVF

SEQ ID NO: 274960 - protein, 15 aa, Artificial Sequence
  Description of Artificial Sequence: Synthetic peptide
  Seed: SIGKVCRTLLAKSVF
SIYKVCRALLHKSVF

SEQ ID NO: 274961 - protein, 15 aa, Artificial Sequence
  Description of Artificial Sequence: Synthetic peptide
  Seed: SIGKVCRTLLAKSVF
SIYKVCRALLRKSVF

SEQ ID NO: 274962 - protein, 15 aa, Artificial Sequence
  Description of Artificial Sequence: Synthetic peptide
  Seed: SIGKVCRTLLAKSVF
SIYKVCRALLSKSVF

SEQ ID NO: 274963 - protein, 15 aa, Artificial Sequence
  Description of Artificial Sequence: Synthetic peptide
  Seed: SIGKVCRTLLAKSVF
SIYKVCRGLLRKSVF

SEQ ID NO: 274964 - protein, 15 aa, Artificial Sequence
  Description of Artificial Sequence: Synthetic peptide
  Seed: SIGKVCRTLLAKSVF
SIYKVCRHLLAKSVF

SEQ ID NO: 274965 - protein, 15 aa, Artificial Sequence
  Description of Artificial Sequence: Synthetic peptide
  Seed: SIGKVCRTLLAKSVF
SIYKVCRHLLGKSVF

SEQ ID NO: 274966 - protein, 15 aa, Artificial Sequence
  Description of Artificial Sequence: Synthetic peptide
  Seed: SIGKVCRTLLAKSVF
SIYKVCRHLLKKSVF

SEQ ID NO: 274967 - protein, 15 aa, Artificial Sequence
  Description of Artificial Sequence: Synthetic peptide
  Seed: SIGKVCRTLLAKSVF
SIYKVCRHLLRKSVF

SEQ ID NO: 274968 - protein, 15 aa, Artificial Sequence
  Description of Artificial Sequence: Synthetic peptide
  Seed: SIGKVCRTLLAKSVF
SIYKVCRHLLSKSVF

SEQ ID NO: 274969 - protein, 15 aa, Artificial Sequence
  Description of Artificial Sequence: Synthetic peptide
  Seed: SIGKVCRTLLAKSVF
SIYKVCRILLRKSVF

SEQ ID NO: 274970 - protein, 15 aa, Artificial Sequence
  Description of Artificial Sequence: Synthetic peptide
  Seed: SIGKVCRTLLAKSVF
SIYKVCRKLLAKSVF

SEQ ID NO: 274971 - protein, 15 aa, Artificial Sequence
  Description of Artificial Sequence: Synthetic peptide
  Seed: SIGKVCRTLLAKSVF
SIYKVCRKLLFKSVF

SEQ ID NO: 274972 - protein, 15 aa, Artificial Sequence
  Description of Artificial Sequence: Synthetic peptide
  Seed: SIGKVCRTLLAKSVF
SIYKVCRKLLGKSVF

SEQ ID NO: 274973 - protein, 15 aa, Artificial Sequence
  Description of Artificial Sequence: Synthetic peptide
  Seed: SIGKVCRTLLAKSVF
SIYKVCRKLLHKSVF

SEQ ID NO: 274974 - protein, 15 aa, Artificial Sequence
  Description of Artificial Sequence: Synthetic peptide
  Seed: SIGKVCRTLLAKSVF
SIYKVCRKLLIKSVF

SEQ ID NO: 274975 - protein, 15 aa, Artificial Sequence
  Description of Artificial Sequence: Synthetic peptide
  Seed: SIGKVCRTLLAKSVF
SIYKVCRKLLKKSVF

SEQ ID NO: 274976 - protein, 15 aa, Artificial Sequence
  Description of Artificial Sequence: Synthetic peptide
  Seed: SIGKVCRTLLAKSVF
SIYKVCRKLLLKSVF

SEQ ID NO: 274977 - protein, 15 aa, Artificial Sequence
  Description of Artificial Sequence: Synthetic peptide
  Seed: SIGKVCRTLLAKSVF
SIYKVCRKLLMKSVF

SEQ ID NO: 274978 - protein, 15 aa, Artificial Sequence
  Description of Artificial Sequence: Synthetic peptide
  Seed: SIGKVCRTLLAKSVF
SIYKVCRKLLNKSVF

SEQ ID NO: 274979 - protein, 15 aa, Artificial Sequence
  Description of Artificial Sequence: Synthetic peptide
  Seed: SIGKVCRTLLAKSVF
SIYKVCRKLLPKSVF

SEQ ID NO: 274980 - protein, 15 aa, Artificial Sequence
  Description of Artificial Sequence: Synthetic peptide
  Seed: SIGKVCRTLLAKSVF
SIYKVCRKLLQKSVF

SEQ ID NO: 274981 - protein, 15 aa, Artificial Sequence
  Description of Artificial Sequence: Synthetic peptide
  Seed: SIGKVCRTLLAKSVF
SIYKVCRKLLRKSVF

SEQ ID NO: 274982 - protein, 15 aa, Artificial Sequence
  Description of Artificial Sequence: Synthetic peptide
  Seed: SIGKVCRTLLAKSVF
SIYKVCRKLLSKSVF

SEQ ID NO: 274983 - protein, 15 aa, Artificial Sequence
  Description of Artificial Sequence: Synthetic peptide
  Seed: SIGKVCRTLLAKSVF
SIYKVCRKLLTKSVF

SEQ ID NO: 274984 - protein, 15 aa, Artificial Sequence
  Description of Artificial Sequence: Synthetic peptide
  Seed: SIGKVCRTLLAKSVF
SIYKVCRKLLVKSVF

SEQ ID NO: 274985 - protein, 15 aa, Artificial Sequence
  Description of Artificial Sequence: Synthetic peptide
  Seed: SIGKVCRTLLAKSVF
SIYKVCRKLLYKSVF

SEQ ID NO: 274986 - protein, 15 aa, Artificial Sequence
  Description of Artificial Sequence: Synthetic peptide
  Seed: SIGKVCRTLLAKSVF
SIYKVCRMLLRKSVF

SEQ ID NO: 274987 - protein, 15 aa, Artificial Sequence
  Description of Artificial Sequence: Synthetic peptide
  Seed: SIGKVCRTLLAKSVF
SIYKVCRNLLAKSVF

SEQ ID NO: 274988 - protein, 15 aa, Artificial Sequence
  Description of Artificial Sequence: Synthetic peptide
  Seed: SIGKVCRTLLAKSVF
SIYKVCRNLLDKSVF

SEQ ID NO: 274989 - protein, 15 aa, Artificial Sequence
  Description of Artificial Sequence: Synthetic peptide
  Seed: SIGKVCRTLLAKSVF
SIYKVCRNLLRKSVF

SEQ ID NO: 274990 - protein, 15 aa, Artificial Sequence
  Description of Artificial Sequence: Synthetic peptide
  Seed: SIGKVCRTLLAKSVF
SIYKVCRPLLAKSVF

SEQ ID NO: 274991 - protein, 15 aa, Artificial Sequence
  Description of Artificial Sequence: Synthetic peptide
  Seed: SIGKVCRTLLAKSVF
SIYKVCRPLLRKSVF

SEQ ID NO: 274992 - protein, 15 aa, Artificial Sequence
  Description of Artificial Sequence: Synthetic peptide
  Seed: SIGKVCRTLLAKSVF
SIYKVCRPLLSKSVF

SEQ ID NO: 274993 - protein, 15 aa, Artificial Sequence
  Description of Artificial Sequence: Synthetic peptide
  Seed: SIGKVCRTLLAKSVF
SIYKVCRQLLRKSVF

SEQ ID NO: 274994 - protein, 15 aa, Artificial Sequence
  Description of Artificial Sequence: Synthetic peptide
  Seed: SIGKVCRTLLAKSVF
SIYKVCRRLLAKSVF

SEQ ID NO: 274995 - protein, 15 aa, Artificial Sequence
  Description of Artificial Sequence: Synthetic peptide
  Seed: SIGKVCRTLLAKSVF
SIYKVCRRLLDKSVF

SEQ ID NO: 274996 - protein, 15 aa, Artificial Sequence
  Description of Artificial Sequence: Synthetic peptide
  Seed: SIGKVCRTLLAKSVF
SIYKVCRRLLEKSVF

SEQ ID NO: 274997 - protein, 15 aa, Artificial Sequence
  Description of Artificial Sequence: Synthetic peptide
  Seed: SIGKVCRTLLAKSVF
SIYKVCRRLLFKSVF

SEQ ID NO: 274998 - protein, 15 aa, Artificial Sequence
  Description of Artificial Sequence: Synthetic peptide
  Seed: SIGKVCRTLLAKSVF
SIYKVCRRLLGKSVF

SEQ ID NO: 274999 - protein, 15 aa, Artificial Sequence
  Description of Artificial Sequence: Synthetic peptide
  Seed: SIGKVCRTLLAKSVF
SIYKVCRRLLHKSVF

SEQ ID NO: 275000 - protein, 15 aa, Artificial Sequence
  Description of Artificial Sequence: Synthetic peptide
  Seed: SIGKVCRTLLAKSVF
SIYKVCRRLLIKSVF

SEQ ID NO: 275001 - protein, 15 aa, Artificial Sequence
  Description of Artificial Sequence: Synthetic peptide
  Seed: SIGKVCRTLLAKSVF
SIYKVCRRLLKKSVF

SEQ ID NO: 275002 - protein, 15 aa, Artificial Sequence
  Description of Artificial Sequence: Synthetic peptide
  Seed: SIGKVCRTLLAKSVF
SIYKVCRRLLLKSVF

SEQ ID NO: 275003 - protein, 15 aa, Artificial Sequence
  Description of Artificial Sequence: Synthetic peptide
  Seed: SIGKVCRTLLAKSVF
SIYKVCRRLLMKSVF

SEQ ID NO: 275004 - protein, 15 aa, Artificial Sequence
  Description of Artificial Sequence: Synthetic peptide
  Seed: SIGKVCRTLLAKSVF
SIYKVCRRLLNKSVF

SEQ ID NO: 275005 - protein, 15 aa, Artificial Sequence
  Description of Artificial Sequence: Synthetic peptide
  Seed: SIGKVCRTLLAKSVF
SIYKVCRRLLPKSVF

SEQ ID NO: 275006 - protein, 15 aa, Artificial Sequence
  Description of Artificial Sequence: Synthetic peptide
  Seed: SIGKVCRTLLAKSVF
SIYKVCRRLLQKSVF

SEQ ID NO: 275007 - protein, 15 aa, Artificial Sequence
  Description of Artificial Sequence: Synthetic peptide
  Seed: SIGKVCRTLLAKSVF
SIYKVCRRLLRKSVF

SEQ ID NO: 275008 - protein, 15 aa, Artificial Sequence
  Description of Artificial Sequence: Synthetic peptide
  Seed: SIGKVCRTLLAKSVF
SIYKVCRRLLSKSVF

SEQ ID NO: 275009 - protein, 15 aa, Artificial Sequence
  Description of Artificial Sequence: Synthetic peptide
  Seed: SIGKVCRTLLAKSVF
SIYKVCRRLLTKSVF

SEQ ID NO: 275010 - protein, 15 aa, Artificial Sequence
  Description of Artificial Sequence: Synthetic peptide
  Seed: SIGKVCRTLLAKSVF
SIYKVCRRLLVKSVF

SEQ ID NO: 275011 - protein, 15 aa, Artificial Sequence
  Description of Artificial Sequence: Synthetic peptide
  Seed: SIGKVCRTLLAKSVF
SIYKVCRRLLYKSVF

SEQ ID NO: 275012 - protein, 15 aa, Artificial Sequence
  Description of Artificial Sequence: Synthetic peptide
  Seed: SIGKVCRTLLAKSVF
SIYKVCRSLLAKSVF

SEQ ID NO: 275013 - protein, 15 aa, Artificial Sequence
  Description of Artificial Sequence: Synthetic peptide
  Seed: SIGKVCRTLLAKSVF
SIYKVCRSLLDKSVF

SEQ ID NO: 275014 - protein, 15 aa, Artificial Sequence
  Description of Artificial Sequence: Synthetic peptide
  Seed: SIGKVCRTLLAKSVF
SIYKVCRSLLGKSVF

SEQ ID NO: 275015 - protein, 15 aa, Artificial Sequence
  Description of Artificial Sequence: Synthetic peptide
  Seed: SIGKVCRTLLAKSVF
SIYKVCRSLLKKSVF

SEQ ID NO: 275016 - protein, 15 aa, Artificial Sequence
  Description of Artificial Sequence: Synthetic peptide
  Seed: SIGKVCRTLLAKSVF
SIYKVCRSLLRKSVF

SEQ ID NO: 275017 - protein, 15 aa, Artificial Sequence
  Description of Artificial Sequence: Synthetic peptide
  Seed: SIGKVCRTLLAKSVF
SIYKVCRSLLSKSVF

SEQ ID NO: 275018 - protein, 15 aa, Artificial Sequence
  Description of Artificial Sequence: Synthetic peptide
  Seed: SIGKVCRTLLAKSVF
SIYKVCRTLLAKSVF

SEQ ID NO: 275019 - protein, 15 aa, Artificial Sequence
  Description of Artificial Sequence: Synthetic peptide
  Seed: SIGKVCRTLLAKSVF
SIYKVCRTLLDKSVF

SEQ ID NO: 275020 - protein, 15 aa, Artificial Sequence
  Description of Artificial Sequence: Synthetic peptide
  Seed: SIGKVCRTLLAKSVF
SIYKVCRTLLGKSVF

SEQ ID NO: 275021 - protein, 15 aa, Artificial Sequence
  Description of Artificial Sequence: Synthetic peptide
  Seed: SIGKVCRTLLAKSVF
SIYKVCRTLLKKSVF

SEQ ID NO: 275022 - protein, 15 aa, Artificial Sequence
  Description of Artificial Sequence: Synthetic peptide
  Seed: SIGKVCRTLLAKSVF
SIYKVCRTLLRKSVF

SEQ ID NO: 275023 - protein, 15 aa, Artificial Sequence
  Description of Artificial Sequence: Synthetic peptide
  Seed: SIGKVCRTLLAKSVF
SIYKVCRTLLSKSVF

SEQ ID NO: 275024 - protein, 15 aa, Artificial Sequence
  Description of Artificial Sequence: Synthetic peptide
  Seed: SIGKVCRTLLAKSVF
SIYKVCRVLLKKSVF

SEQ ID NO: 275025 - protein, 15 aa, Artificial Sequence
  Description of Artificial Sequence: Synthetic peptide
  Seed: SIGKVCRTLLAKSVF
SIYKVCRVLLRKSVF

SEQ ID NO: 275026 - protein, 15 aa, Artificial Sequence
  Description of Artificial Sequence: Synthetic peptide
  Seed: SIGKVCRTLLAKSVF
SIYKVDRALLAKSVF

SEQ ID NO: 275027 - protein, 15 aa, Artificial Sequence
  Description of Artificial Sequence: Synthetic peptide
  Seed: SIGKVCRTLLAKSVF
SIYKVDRALLGKSVF

SEQ ID NO: 275028 - protein, 15 aa, Artificial Sequence
  Description of Artificial Sequence: Synthetic peptide
  Seed: SIGKVCRTLLAKSVF
SIYKVDRALLQKSVF

SEQ ID NO: 275029 - protein, 15 aa, Artificial Sequence
  Description of Artificial Sequence: Synthetic peptide
  Seed: SIGKVCRTLLAKSVF
SIYKVDRALLSKSVF

SEQ ID NO: 275030 - protein, 15 aa, Artificial Sequence
  Description of Artificial Sequence: Synthetic peptide
  Seed: SIGKVCRTLLAKSVF
SIYKVDRDLLAKSVF

SEQ ID NO: 275031 - protein, 15 aa, Artificial Sequence
  Description of Artificial Sequence: Synthetic peptide
  Seed: SIGKVCRTLLAKSVF
SIYKVDRDLLSKSVF

SEQ ID NO: 275032 - protein, 15 aa, Artificial Sequence
  Description of Artificial Sequence: Synthetic peptide
  Seed: SIGKVCRTLLAKSVF
SIYKVDRGLLAKSVF

SEQ ID NO: 275033 - protein, 15 aa, Artificial Sequence
  Description of Artificial Sequence: Synthetic peptide
  Seed: SIGKVCRTLLAKSVF
SIYKVDRGLLSKSVF

SEQ ID NO: 275034 - protein, 15 aa, Artificial Sequence
  Description of Artificial Sequence: Synthetic peptide
  Seed: SIGKVCRTLLAKSVF
SIYKVDRNLLAKSVF

SEQ ID NO: 275035 - protein, 15 aa, Artificial Sequence
  Description of Artificial Sequence: Synthetic peptide
  Seed: SIGKVCRTLLAKSVF
SIYKVDRNLLGKSVF

SEQ ID NO: 275036 - protein, 15 aa, Artificial Sequence
  Description of Artificial Sequence: Synthetic peptide
  Seed: SIGKVCRTLLAKSVF
SIYKVDRNLLHKSVF

SEQ ID NO: 275037 - protein, 15 aa, Artificial Sequence
  Description of Artificial Sequence: Synthetic peptide
  Seed: SIGKVCRTLLAKSVF
SIYKVDRNLLMKSVF

SEQ ID NO: 275038 - protein, 15 aa, Artificial Sequence
  Description of Artificial Sequence: Synthetic peptide
  Seed: SIGKVCRTLLAKSVF
SIYKVDRNLLNKSVF

SEQ ID NO: 275039 - protein, 15 aa, Artificial Sequence
  Description of Artificial Sequence: Synthetic peptide
  Seed: SIGKVCRTLLAKSVF
SIYKVDRNLLQKSVF

SEQ ID NO: 275040 - protein, 15 aa, Artificial Sequence
  Description of Artificial Sequence: Synthetic peptide
  Seed: SIGKVCRTLLAKSVF
SIYKVDRNLLSKSVF

SEQ ID NO: 275041 - protein, 15 aa, Artificial Sequence
  Description of Artificial Sequence: Synthetic peptide
  Seed: SIGKVCRTLLAKSVF
SIYKVDRNLLTKSVF

SEQ ID NO: 275042 - protein, 15 aa, Artificial Sequence
  Description of Artificial Sequence: Synthetic peptide
  Seed: SIGKVCRTLLAKSVF
SIYKVDRNLLVKSVF

SEQ ID NO: 275043 - protein, 15 aa, Artificial Sequence
  Description of Artificial Sequence: Synthetic peptide
  Seed: SIGKVCRTLLAKSVF
SIYKVDRPLLAKSVF

SEQ ID NO: 275044 - protein, 15 aa, Artificial Sequence
  Description of Artificial Sequence: Synthetic peptide
  Seed: SIGKVCRTLLAKSVF
SIYKVDRPLLSKSVF

SEQ ID NO: 275045 - protein, 15 aa, Artificial Sequence
  Description of Artificial Sequence: Synthetic peptide
  Seed: SIGKVCRTLLAKSVF
SIYKVDRRLLAKSVF

SEQ ID NO: 275046 - protein, 15 aa, Artificial Sequence
  Description of Artificial Sequence: Synthetic peptide
  Seed: SIGKVCRTLLAKSVF
SIYKVDRRLLGKSVF

SEQ ID NO: 275047 - protein, 15 aa, Artificial Sequence
  Description of Artificial Sequence: Synthetic peptide
  Seed: SIGKVCRTLLAKSVF
SIYKVDRRLLHKSVF

SEQ ID NO: 275048 - protein, 15 aa, Artificial Sequence
  Description of Artificial Sequence: Synthetic peptide
  Seed: SIGKVCRTLLAKSVF
SIYKVDRRLLQKSVF

SEQ ID NO: 275049 - protein, 15 aa, Artificial Sequence
  Description of Artificial Sequence: Synthetic peptide
  Seed: SIGKVCRTLLAKSVF
SIYKVDRRLLRKSVF

SEQ ID NO: 275050 - protein, 15 aa, Artificial Sequence
  Description of Artificial Sequence: Synthetic peptide
  Seed: SIGKVCRTLLAKSVF
SIYKVDRRLLSKSVF

SEQ ID NO: 275051 - protein, 15 aa, Artificial Sequence
  Description of Artificial Sequence: Synthetic peptide
  Seed: SIGKVCRTLLAKSVF
SIYKVDRRLLVKSVF

SEQ ID NO: 275052 - protein, 15 aa, Artificial Sequence
  Description of Artificial Sequence: Synthetic peptide
  Seed: SIGKVCRTLLAKSVF
SIYKVDRSLLAKSVF

SEQ ID NO: 275053 - protein, 15 aa, Artificial Sequence
  Description of Artificial Sequence: Synthetic peptide
  Seed: SIGKVCRTLLAKSVF
SIYKVDRSLLGKSVF

SEQ ID NO: 275054 - protein, 15 aa, Artificial Sequence
  Description of Artificial Sequence: Synthetic peptide
  Seed: SIGKVCRTLLAKSVF
SIYKVDRSLLHKSVF

SEQ ID NO: 275055 - protein, 15 aa, Artificial Sequence
  Description of Artificial Sequence: Synthetic peptide
  Seed: SIGKVCRTLLAKSVF
SIYKVDRSLLNKSVF

SEQ ID NO: 275056 - protein, 15 aa, Artificial Sequence
  Description of Artificial Sequence: Synthetic peptide
  Seed: SIGKVCRTLLAKSVF
SIYKVDRSLLQKSVF

SEQ ID NO: 275057 - protein, 15 aa, Artificial Sequence
  Description of Artificial Sequence: Synthetic peptide
  Seed: SIGKVCRTLLAKSVF
SIYKVDRSLLSKSVF

SEQ ID NO: 275058 - protein, 15 aa, Artificial Sequence
  Description of Artificial Sequence: Synthetic peptide
  Seed: SIGKVCRTLLAKSVF
SIYKVDRSLLTKSVF

SEQ ID NO: 275059 - protein, 15 aa, Artificial Sequence
  Description of Artificial Sequence: Synthetic peptide
  Seed: SIGKVCRTLLAKSVF
SIYKVDRTLLAKSVF

SEQ ID NO: 275060 - protein, 15 aa, Artificial Sequence
  Description of Artificial Sequence: Synthetic peptide
  Seed: SIGKVCRTLLAKSVF
SIYKVDRTLLGKSVF

SEQ ID NO: 275061 - protein, 15 aa, Artificial Sequence
  Description of Artificial Sequence: Synthetic peptide
  Seed: SIGKVCRTLLAKSVF
SIYKVDRTLLHKSVF

SEQ ID NO: 275062 - protein, 15 aa, Artificial Sequence
  Description of Artificial Sequence: Synthetic peptide
  Seed: SIGKVCRTLLAKSVF
SIYKVDRTLLIKSVF

SEQ ID NO: 275063 - protein, 15 aa, Artificial Sequence
  Description of Artificial Sequence: Synthetic peptide
  Seed: SIGKVCRTLLAKSVF
SIYKVDRTLLLKSVF

SEQ ID NO: 275064 - protein, 15 aa, Artificial Sequence
  Description of Artificial Sequence: Synthetic peptide
  Seed: SIGKVCRTLLAKSVF
SIYKVDRTLLMKSVF

SEQ ID NO: 275065 - protein, 15 aa, Artificial Sequence
  Description of Artificial Sequence: Synthetic peptide
  Seed: SIGKVCRTLLAKSVF
SIYKVDRTLLNKSVF

SEQ ID NO: 275066 - protein, 15 aa, Artificial Sequence
  Description of Artificial Sequence: Synthetic peptide
  Seed: SIGKVCRTLLAKSVF
SIYKVDRTLLPKSVF

SEQ ID NO: 275067 - protein, 15 aa, Artificial Sequence
  Description of Artificial Sequence: Synthetic peptide
  Seed: SIGKVCRTLLAKSVF
SIYKVDRTLLQKSVF

SEQ ID NO: 275068 - protein, 15 aa, Artificial Sequence
  Description of Artificial Sequence: Synthetic peptide
  Seed: SIGKVCRTLLAKSVF
SIYKVDRTLLSKSVF

SEQ ID NO: 275069 - protein, 15 aa, Artificial Sequence
  Description of Artificial Sequence: Synthetic peptide
  Seed: SIGKVCRTLLAKSVF
SIYKVDRTLLTKSVF

SEQ ID NO: 275070 - protein, 15 aa, Artificial Sequence
  Description of Artificial Sequence: Synthetic peptide
  Seed: SIGKVCRTLLAKSVF
SIYKVDRTLLVKSVF

SEQ ID NO: 275071 - protein, 15 aa, Artificial Sequence
  Description of Artificial Sequence: Synthetic peptide
  Seed: SIGKVCRTLLAKSVF
SIYKVDRVLLAKSVF

SEQ ID NO: 275072 - protein, 15 aa, Artificial Sequence
  Description of Artificial Sequence: Synthetic peptide
  Seed: SIGKVCRTLLAKSVF
SIYKVDRVLLGKSVF

SEQ ID NO: 275073 - protein, 15 aa, Artificial Sequence
  Description of Artificial Sequence: Synthetic peptide
  Seed: SIGKVCRTLLAKSVF
SIYKVDRVLLSKSVF

SEQ ID NO: 275074 - protein, 15 aa, Artificial Sequence
  Description of Artificial Sequence: Synthetic peptide
  Seed: SIGKVCRTLLAKSVF
SIYKVERALLSKSVF

SEQ ID NO: 275075 - protein, 15 aa, Artificial Sequence
  Description of Artificial Sequence: Synthetic peptide
  Seed: SIGKVCRTLLAKSVF
SIYKVERKLLAKSVF

SEQ ID NO: 275076 - protein, 15 aa, Artificial Sequence
  Description of Artificial Sequence: Synthetic peptide
  Seed: SIGKVCRTLLAKSVF
SIYKVERKLLGKSVF

SEQ ID NO: 275077 - protein, 15 aa, Artificial Sequence
  Description of Artificial Sequence: Synthetic peptide
  Seed: SIGKVCRTLLAKSVF
SIYKVERKLLHKSVF

SEQ ID NO: 275078 - protein, 15 aa, Artificial Sequence
  Description of Artificial Sequence: Synthetic peptide
  Seed: SIGKVCRTLLAKSVF
SIYKVERKLLKKSVF

SEQ ID NO: 275079 - protein, 15 aa, Artificial Sequence
  Description of Artificial Sequence: Synthetic peptide
  Seed: SIGKVCRTLLAKSVF
SIYKVERKLLNKSVF

SEQ ID NO: 275080 - protein, 15 aa, Artificial Sequence
  Description of Artificial Sequence: Synthetic peptide
  Seed: SIGKVCRTLLAKSVF
SIYKVERKLLQKSVF

SEQ ID NO: 275081 - protein, 15 aa, Artificial Sequence
  Description of Artificial Sequence: Synthetic peptide
  Seed: SIGKVCRTLLAKSVF
SIYKVERKLLRKSVF

SEQ ID NO: 275082 - protein, 15 aa, Artificial Sequence
  Description of Artificial Sequence: Synthetic peptide
  Seed: SIGKVCRTLLAKSVF
SIYKVERKLLSKSVF

SEQ ID NO: 275083 - protein, 15 aa, Artificial Sequence
  Description of Artificial Sequence: Synthetic peptide
  Seed: SIGKVCRTLLAKSVF
SIYKVERKLLTKSVF

SEQ ID NO: 275084 - protein, 15 aa, Artificial Sequence
  Description of Artificial Sequence: Synthetic peptide
  Seed: SIGKVCRTLLAKSVF
SIYKVERNLLAKSVF

SEQ ID NO: 275085 - protein, 15 aa, Artificial Sequence
  Description of Artificial Sequence: Synthetic peptide
  Seed: SIGKVCRTLLAKSVF
SIYKVERNLLDKSVF

SEQ ID NO: 275086 - protein, 15 aa, Artificial Sequence
  Description of Artificial Sequence: Synthetic peptide
  Seed: SIGKVCRTLLAKSVF
SIYKVERNLLGKSVF

SEQ ID NO: 275087 - protein, 15 aa, Artificial Sequence
  Description of Artificial Sequence: Synthetic peptide
  Seed: SIGKVCRTLLAKSVF
SIYKVERNLLSKSVF

SEQ ID NO: 275088 - protein, 15 aa, Artificial Sequence
  Description of Artificial Sequence: Synthetic peptide
  Seed: SIGKVCRTLLAKSVF
SIYKVERNLLTKSVF

SEQ ID NO: 275089 - protein, 15 aa, Artificial Sequence
  Description of Artificial Sequence: Synthetic peptide
  Seed: SIGKVCRTLLAKSVF
SIYKVERRLLAKSVF

SEQ ID NO: 275090 - protein, 15 aa, Artificial Sequence
  Description of Artificial Sequence: Synthetic peptide
  Seed: SIGKVCRTLLAKSVF
SIYKVERRLLFKSVF

SEQ ID NO: 275091 - protein, 15 aa, Artificial Sequence
  Description of Artificial Sequence: Synthetic peptide
  Seed: SIGKVCRTLLAKSVF
SIYKVERRLLGKSVF

SEQ ID NO: 275092 - protein, 15 aa, Artificial Sequence
  Description of Artificial Sequence: Synthetic peptide
  Seed: SIGKVCRTLLAKSVF
SIYKVERRLLHKSVF

SEQ ID NO: 275093 - protein, 15 aa, Artificial Sequence
  Description of Artificial Sequence: Synthetic peptide
  Seed: SIGKVCRTLLAKSVF
SIYKVERRLLIKSVF

SEQ ID NO: 275094 - protein, 15 aa, Artificial Sequence
  Description of Artificial Sequence: Synthetic peptide
  Seed: SIGKVCRTLLAKSVF
SIYKVERRLLKKSVF

SEQ ID NO: 275095 - protein, 15 aa, Artificial Sequence
  Description of Artificial Sequence: Synthetic peptide
  Seed: SIGKVCRTLLAKSVF
SIYKVERRLLLKSVF

SEQ ID NO: 275096 - protein, 15 aa, Artificial Sequence
  Description of Artificial Sequence: Synthetic peptide
  Seed: SIGKVCRTLLAKSVF
SIYKVERRLLMKSVF

SEQ ID NO: 275097 - protein, 15 aa, Artificial Sequence
  Description of Artificial Sequence: Synthetic peptide
  Seed: SIGKVCRTLLAKSVF
SIYKVERRLLNKSVF

SEQ ID NO: 275098 - protein, 15 aa, Artificial Sequence
  Description of Artificial Sequence: Synthetic peptide
  Seed: SIGKVCRTLLAKSVF
SIYKVERRLLPKSVF

SEQ ID NO: 275099 - protein, 15 aa, Artificial Sequence
  Description of Artificial Sequence: Synthetic peptide
  Seed: SIGKVCRTLLAKSVF
SIYKVERRLLQKSVF

SEQ ID NO: 275100 - protein, 15 aa, Artificial Sequence
  Description of Artificial Sequence: Synthetic peptide
  Seed: SIGKVCRTLLAKSVF
SIYKVERRLLRKSVF

SEQ ID NO: 275101 - protein, 15 aa, Artificial Sequence
  Description of Artificial Sequence: Synthetic peptide
  Seed: SIGKVCRTLLAKSVF
SIYKVERRLLSKSVF

SEQ ID NO: 275102 - protein, 15 aa, Artificial Sequence
  Description of Artificial Sequence: Synthetic peptide
  Seed: SIGKVCRTLLAKSVF
SIYKVERRLLTKSVF

SEQ ID NO: 275103 - protein, 15 aa, Artificial Sequence
  Description of Artificial Sequence: Synthetic peptide
  Seed: SIGKVCRTLLAKSVF
SIYKVERRLLVKSVF

SEQ ID NO: 275104 - protein, 15 aa, Artificial Sequence
  Description of Artificial Sequence: Synthetic peptide
  Seed: SIGKVCRTLLAKSVF
SIYKVERRLLYKSVF

SEQ ID NO: 275105 - protein, 15 aa, Artificial Sequence
  Description of Artificial Sequence: Synthetic peptide
  Seed: SIGKVCRTLLAKSVF
SIYKVERSLLAKSVF

SEQ ID NO: 275106 - protein, 15 aa, Artificial Sequence
  Description of Artificial Sequence: Synthetic peptide
  Seed: SIGKVCRTLLAKSVF
SIYKVERSLLDKSVF

SEQ ID NO: 275107 - protein, 15 aa, Artificial Sequence
  Description of Artificial Sequence: Synthetic peptide
  Seed: SIGKVCRTLLAKSVF
SIYKVERSLLGKSVF

SEQ ID NO: 275108 - protein, 15 aa, Artificial Sequence
  Description of Artificial Sequence: Synthetic peptide
  Seed: SIGKVCRTLLAKSVF
SIYKVERSLLSKSVF

SEQ ID NO: 275109 - protein, 15 aa, Artificial Sequence
  Description of Artificial Sequence: Synthetic peptide
  Seed: SIGKVCRTLLAKSVF
SIYKVERSLLTKSVF

SEQ ID NO: 275110 - protein, 15 aa, Artificial Sequence
  Description of Artificial Sequence: Synthetic peptide
  Seed: SIGKVCRTLLAKSVF
SIYKVERTLLAKSVF

SEQ ID NO: 275111 - protein, 15 aa, Artificial Sequence
  Description of Artificial Sequence: Synthetic peptide
  Seed: SIGKVCRTLLAKSVF
SIYKVERTLLDKSVF

SEQ ID NO: 275112 - protein, 15 aa, Artificial Sequence
  Description of Artificial Sequence: Synthetic peptide
  Seed: SIGKVCRTLLAKSVF
SIYKVERTLLGKSVF

SEQ ID NO: 275113 - protein, 15 aa, Artificial Sequence
  Description of Artificial Sequence: Synthetic peptide
  Seed: SIGKVCRTLLAKSVF
SIYKVERTLLHKSVF

SEQ ID NO: 275114 - protein, 15 aa, Artificial Sequence
  Description of Artificial Sequence: Synthetic peptide
  Seed: SIGKVCRTLLAKSVF
SIYKVERTLLQKSVF

SEQ ID NO: 275115 - protein, 15 aa, Artificial Sequence
  Description of Artificial Sequence: Synthetic peptide
  Seed: SIGKVCRTLLAKSVF
SIYKVERTLLSKSVF

SEQ ID NO: 275116 - protein, 15 aa, Artificial Sequence
  Description of Artificial Sequence: Synthetic peptide
  Seed: SIGKVCRTLLAKSVF
SIYKVERTLLTKSVF

SEQ ID NO: 275117 - protein, 15 aa, Artificial Sequence
  Description of Artificial Sequence: Synthetic peptide
  Seed: SIGKVCRTLLAKSVF
SIYKVFRALLAKSVF

SEQ ID NO: 275118 - protein, 15 aa, Artificial Sequence
  Description of Artificial Sequence: Synthetic peptide
  Seed: SIGKVCRTLLAKSVF
SIYKVFRALLDKSVF

SEQ ID NO: 275119 - protein, 15 aa, Artificial Sequence
  Description of Artificial Sequence: Synthetic peptide
  Seed: SIGKVCRTLLAKSVF
SIYKVFRALLGKSVF

SEQ ID NO: 275120 - protein, 15 aa, Artificial Sequence
  Description of Artificial Sequence: Synthetic peptide
  Seed: SIGKVCRTLLAKSVF
SIYKVFRALLHKSVF

SEQ ID NO: 275121 - protein, 15 aa, Artificial Sequence
  Description of Artificial Sequence: Synthetic peptide
  Seed: SIGKVCRTLLAKSVF
SIYKVFRALLNKSVF

SEQ ID NO: 275122 - protein, 15 aa, Artificial Sequence
  Description of Artificial Sequence: Synthetic peptide
  Seed: SIGKVCRTLLAKSVF
SIYKVFRALLSKSVF

SEQ ID NO: 275123 - protein, 15 aa, Artificial Sequence
  Description of Artificial Sequence: Synthetic peptide
  Seed: SIGKVCRTLLAKSVF
SIYKVFRELLRKSVF

SEQ ID NO: 275124 - protein, 15 aa, Artificial Sequence
  Description of Artificial Sequence: Synthetic peptide
  Seed: SIGKVCRTLLAKSVF
SIYKVFRGLLAKSVF

SEQ ID NO: 275125 - protein, 15 aa, Artificial Sequence
  Description of Artificial Sequence: Synthetic peptide
  Seed: SIGKVCRTLLAKSVF
SIYKVFRGLLDKSVF

SEQ ID NO: 275126 - protein, 15 aa, Artificial Sequence
  Description of Artificial Sequence: Synthetic peptide
  Seed: SIGKVCRTLLAKSVF
SIYKVFRGLLHKSVF

SEQ ID NO: 275127 - protein, 15 aa, Artificial Sequence
  Description of Artificial Sequence: Synthetic peptide
  Seed: SIGKVCRTLLAKSVF
SIYKVFRGLLSKSVF

SEQ ID NO: 275128 - protein, 15 aa, Artificial Sequence
  Description of Artificial Sequence: Synthetic peptide
  Seed: SIGKVCRTLLAKSVF
SIYKVFRHLLAKSVF

SEQ ID NO: 275129 - protein, 15 aa, Artificial Sequence
  Description of Artificial Sequence: Synthetic peptide
  Seed: SIGKVCRTLLAKSVF
SIYKVFRHLLGKSVF

SEQ ID NO: 275130 - protein, 15 aa, Artificial Sequence
  Description of Artificial Sequence: Synthetic peptide
  Seed: SIGKVCRTLLAKSVF
SIYKVFRHLLHKSVF

SEQ ID NO: 275131 - protein, 15 aa, Artificial Sequence
  Description of Artificial Sequence: Synthetic peptide
  Seed: SIGKVCRTLLAKSVF
SIYKVFRHLLKKSVF

SEQ ID NO: 275132 - protein, 15 aa, Artificial Sequence
  Description of Artificial Sequence: Synthetic peptide
  Seed: SIGKVCRTLLAKSVF
SIYKVFRHLLNKSVF

SEQ ID NO: 275133 - protein, 15 aa, Artificial Sequence
  Description of Artificial Sequence: Synthetic peptide
  Seed: SIGKVCRTLLAKSVF
SIYKVFRHLLPKSVF

SEQ ID NO: 275134 - protein, 15 aa, Artificial Sequence
  Description of Artificial Sequence: Synthetic peptide
  Seed: SIGKVCRTLLAKSVF
SIYKVFRHLLQKSVF

SEQ ID NO: 275135 - protein, 15 aa, Artificial Sequence
  Description of Artificial Sequence: Synthetic peptide
  Seed: SIGKVCRTLLAKSVF
SIYKVFRHLLRKSVF

SEQ ID NO: 275136 - protein, 15 aa, Artificial Sequence
  Description of Artificial Sequence: Synthetic peptide
  Seed: SIGKVCRTLLAKSVF
SIYKVFRHLLSKSVF

SEQ ID NO: 275137 - protein, 15 aa, Artificial Sequence
  Description of Artificial Sequence: Synthetic peptide
  Seed: SIGKVCRTLLAKSVF
SIYKVFRHLLTKSVF

SEQ ID NO: 275138 - protein, 15 aa, Artificial Sequence
  Description of Artificial Sequence: Synthetic peptide
  Seed: SIGKVCRTLLAKSVF
SIYKVFRHLLVKSVF

SEQ ID NO: 275139 - protein, 15 aa, Artificial Sequence
  Description of Artificial Sequence: Synthetic peptide
  Seed: SIGKVCRTLLAKSVF
SIYKVFRKLLAKSVF

SEQ ID NO: 275140 - protein, 15 aa, Artificial Sequence
  Description of Artificial Sequence: Synthetic peptide
  Seed: SIGKVCRTLLAKSVF
SIYKVFRKLLEKSVF

SEQ ID NO: 275141 - protein, 15 aa, Artificial Sequence
  Description of Artificial Sequence: Synthetic peptide
  Seed: SIGKVCRTLLAKSVF
SIYKVFRKLLFKSVF

SEQ ID NO: 275142 - protein, 15 aa, Artificial Sequence
  Description of Artificial Sequence: Synthetic peptide
  Seed: SIGKVCRTLLAKSVF
SIYKVFRKLLGKSVF

SEQ ID NO: 275143 - protein, 15 aa, Artificial Sequence
  Description of Artificial Sequence: Synthetic peptide
  Seed: SIGKVCRTLLAKSVF
SIYKVFRKLLHKSVF

SEQ ID NO: 275144 - protein, 15 aa, Artificial Sequence
  Description of Artificial Sequence: Synthetic peptide
  Seed: SIGKVCRTLLAKSVF
SIYKVFRKLLIKSVF

SEQ ID NO: 275145 - protein, 15 aa, Artificial Sequence
  Description of Artificial Sequence: Synthetic peptide
  Seed: SIGKVCRTLLAKSVF
SIYKVFRKLLKKSVF

SEQ ID NO: 275146 - protein, 15 aa, Artificial Sequence
  Description of Artificial Sequence: Synthetic peptide
  Seed: SIGKVCRTLLAKSVF
SIYKVFRKLLLKSVF

SEQ ID NO: 275147 - protein, 15 aa, Artificial Sequence
  Description of Artificial Sequence: Synthetic peptide
  Seed: SIGKVCRTLLAKSVF
SIYKVFRKLLMKSVF

SEQ ID NO: 275148 - protein, 15 aa, Artificial Sequence
  Description of Artificial Sequence: Synthetic peptide
  Seed: SIGKVCRTLLAKSVF
SIYKVFRKLLNKSVF

SEQ ID NO: 275149 - protein, 15 aa, Artificial Sequence
  Description of Artificial Sequence: Synthetic peptide
  Seed: SIGKVCRTLLAKSVF
SIYKVFRKLLPKSVF

SEQ ID NO: 275150 - protein, 15 aa, Artificial Sequence
  Description of Artificial Sequence: Synthetic peptide
  Seed: SIGKVCRTLLAKSVF
SIYKVFRKLLQKSVF

SEQ ID NO: 275151 - protein, 15 aa, Artificial Sequence
  Description of Artificial Sequence: Synthetic peptide
  Seed: SIGKVCRTLLAKSVF
SIYKVFRKLLRKSVF

SEQ ID NO: 275152 - protein, 15 aa, Artificial Sequence
  Description of Artificial Sequence: Synthetic peptide
  Seed: SIGKVCRTLLAKSVF
SIYKVFRKLLSKSVF

SEQ ID NO: 275153 - protein, 15 aa, Artificial Sequence
  Description of Artificial Sequence: Synthetic peptide
  Seed: SIGKVCRTLLAKSVF
SIYKVFRKLLTKSVF

SEQ ID NO: 275154 - protein, 15 aa, Artificial Sequence
  Description of Artificial Sequence: Synthetic peptide
  Seed: SIGKVCRTLLAKSVF
SIYKVFRKLLVKSVF

SEQ ID NO: 275155 - protein, 15 aa, Artificial Sequence
  Description of Artificial Sequence: Synthetic peptide
  Seed: SIGKVCRTLLAKSVF
SIYKVFRKLLWKSVF

SEQ ID NO: 275156 - protein, 15 aa, Artificial Sequence
  Description of Artificial Sequence: Synthetic peptide
  Seed: SIGKVCRTLLAKSVF
SIYKVFRKLLYKSVF

SEQ ID NO: 275157 - protein, 15 aa, Artificial Sequence
  Description of Artificial Sequence: Synthetic peptide
  Seed: SIGKVCRTLLAKSVF
SIYKVFRNLLAKSVF

SEQ ID NO: 275158 - protein, 15 aa, Artificial Sequence
  Description of Artificial Sequence: Synthetic peptide
  Seed: SIGKVCRTLLAKSVF
SIYKVFRNLLDKSVF

SEQ ID NO: 275159 - protein, 15 aa, Artificial Sequence
  Description of Artificial Sequence: Synthetic peptide
  Seed: SIGKVCRTLLAKSVF
SIYKVFRNLLEKSVF

SEQ ID NO: 275160 - protein, 15 aa, Artificial Sequence
  Description of Artificial Sequence: Synthetic peptide
  Seed: SIGKVCRTLLAKSVF
SIYKVFRNLLGKSVF

SEQ ID NO: 275161 - protein, 15 aa, Artificial Sequence
  Description of Artificial Sequence: Synthetic peptide
  Seed: SIGKVCRTLLAKSVF
SIYKVFRNLLHKSVF

SEQ ID NO: 275162 - protein, 15 aa, Artificial Sequence
  Description of Artificial Sequence: Synthetic peptide
  Seed: SIGKVCRTLLAKSVF
SIYKVFRNLLNKSVF

SEQ ID NO: 275163 - protein, 15 aa, Artificial Sequence
  Description of Artificial Sequence: Synthetic peptide
  Seed: SIGKVCRTLLAKSVF
SIYKVFRNLLRKSVF

SEQ ID NO: 275164 - protein, 15 aa, Artificial Sequence
  Description of Artificial Sequence: Synthetic peptide
  Seed: SIGKVCRTLLAKSVF
SIYKVFRNLLSKSVF

SEQ ID NO: 275165 - protein, 15 aa, Artificial Sequence
  Description of Artificial Sequence: Synthetic peptide
  Seed: SIGKVCRTLLAKSVF
SIYKVFRNLLTKSVF

SEQ ID NO: 275166 - protein, 15 aa, Artificial Sequence
  Description of Artificial Sequence: Synthetic peptide
  Seed: SIGKVCRTLLAKSVF
SIYKVFRPLLAKSVF

SEQ ID NO: 275167 - protein, 15 aa, Artificial Sequence
  Description of Artificial Sequence: Synthetic peptide
  Seed: SIGKVCRTLLAKSVF
SIYKVFRPLLDKSVF

SEQ ID NO: 275168 - protein, 15 aa, Artificial Sequence
  Description of Artificial Sequence: Synthetic peptide
  Seed: SIGKVCRTLLAKSVF
SIYKVFRPLLGKSVF

SEQ ID NO: 275169 - protein, 15 aa, Artificial Sequence
  Description of Artificial Sequence: Synthetic peptide
  Seed: SIGKVCRTLLAKSVF
SIYKVFRPLLHKSVF

SEQ ID NO: 275170 - protein, 15 aa, Artificial Sequence
  Description of Artificial Sequence: Synthetic peptide
  Seed: SIGKVCRTLLAKSVF
SIYKVFRPLLQKSVF

SEQ ID NO: 275171 - protein, 15 aa, Artificial Sequence
  Description of Artificial Sequence: Synthetic peptide
  Seed: SIGKVCRTLLAKSVF
SIYKVFRPLLSKSVF

SEQ ID NO: 275172 - protein, 15 aa, Artificial Sequence
  Description of Artificial Sequence: Synthetic peptide
  Seed: SIGKVCRTLLAKSVF
SIYKVFRPLLTKSVF

SEQ ID NO: 275173 - protein, 15 aa, Artificial Sequence
  Description of Artificial Sequence: Synthetic peptide
  Seed: SIGKVCRTLLAKSVF
SIYKVFRQLLHKSVF

SEQ ID NO: 275174 - protein, 15 aa, Artificial Sequence
  Description of Artificial Sequence: Synthetic peptide
  Seed: SIGKVCRTLLAKSVF
SIYKVFRQLLRKSVF

SEQ ID NO: 275175 - protein, 15 aa, Artificial Sequence
  Description of Artificial Sequence: Synthetic peptide
  Seed: SIGKVCRTLLAKSVF
SIYKVFRQLLSKSVF

SEQ ID NO: 275176 - protein, 15 aa, Artificial Sequence
  Description of Artificial Sequence: Synthetic peptide
  Seed: SIGKVCRTLLAKSVF
SIYKVFRRLLAKSVF

SEQ ID NO: 275177 - protein, 15 aa, Artificial Sequence
  Description of Artificial Sequence: Synthetic peptide
  Seed: SIGKVCRTLLAKSVF
SIYKVFRRLLDKSVF

SEQ ID NO: 275178 - protein, 15 aa, Artificial Sequence
  Description of Artificial Sequence: Synthetic peptide
  Seed: SIGKVCRTLLAKSVF
SIYKVFRRLLEKSVF

SEQ ID NO: 275179 - protein, 15 aa, Artificial Sequence
  Description of Artificial Sequence: Synthetic peptide
  Seed: SIGKVCRTLLAKSVF
SIYKVFRRLLFKSVF

SEQ ID NO: 275180 - protein, 15 aa, Artificial Sequence
  Description of Artificial Sequence: Synthetic peptide
  Seed: SIGKVCRTLLAKSVF
SIYKVFRRLLGKSVF

SEQ ID NO: 275181 - protein, 15 aa, Artificial Sequence
  Description of Artificial Sequence: Synthetic peptide
  Seed: SIGKVCRTLLAKSVF
SIYKVFRRLLHKSVF

SEQ ID NO: 275182 - protein, 15 aa, Artificial Sequence
  Description of Artificial Sequence: Synthetic peptide
  Seed: SIGKVCRTLLAKSVF
SIYKVFRRLLIKSVF

SEQ ID NO: 275183 - protein, 15 aa, Artificial Sequence
  Description of Artificial Sequence: Synthetic peptide
  Seed: SIGKVCRTLLAKSVF
SIYKVFRRLLKKSVF

SEQ ID NO: 275184 - protein, 15 aa, Artificial Sequence
  Description of Artificial Sequence: Synthetic peptide
  Seed: SIGKVCRTLLAKSVF
SIYKVFRRLLLKSVF

SEQ ID NO: 275185 - protein, 15 aa, Artificial Sequence
  Description of Artificial Sequence: Synthetic peptide
  Seed: SIGKVCRTLLAKSVF
SIYKVFRRLLMKSVF

SEQ ID NO: 275186 - protein, 15 aa, Artificial Sequence
  Description of Artificial Sequence: Synthetic peptide
  Seed: SIGKVCRTLLAKSVF
SIYKVFRRLLNKSVF

SEQ ID NO: 275187 - protein, 15 aa, Artificial Sequence
  Description of Artificial Sequence: Synthetic peptide
  Seed: SIGKVCRTLLAKSVF
SIYKVFRRLLPKSVF

SEQ ID NO: 275188 - protein, 15 aa, Artificial Sequence
  Description of Artificial Sequence: Synthetic peptide
  Seed: SIGKVCRTLLAKSVF
SIYKVFRRLLQKSVF

SEQ ID NO: 275189 - protein, 15 aa, Artificial Sequence
  Description of Artificial Sequence: Synthetic peptide
  Seed: SIGKVCRTLLAKSVF
SIYKVFRRLLRKSVF

SEQ ID NO: 275190 - protein, 15 aa, Artificial Sequence
  Description of Artificial Sequence: Synthetic peptide
  Seed: SIGKVCRTLLAKSVF
SIYKVFRRLLSKSVF

SEQ ID NO: 275191 - protein, 15 aa, Artificial Sequence
  Description of Artificial Sequence: Synthetic peptide
  Seed: SIGKVCRTLLAKSVF
SIYKVFRRLLTKSVF

SEQ ID NO: 275192 - protein, 15 aa, Artificial Sequence
  Description of Artificial Sequence: Synthetic peptide
  Seed: SIGKVCRTLLAKSVF
SIYKVFRRLLVKSVF

SEQ ID NO: 275193 - protein, 15 aa, Artificial Sequence
  Description of Artificial Sequence: Synthetic peptide
  Seed: SIGKVCRTLLAKSVF
SIYKVFRRLLWKSVF

SEQ ID NO: 275194 - protein, 15 aa, Artificial Sequence
  Description of Artificial Sequence: Synthetic peptide
  Seed: SIGKVCRTLLAKSVF
SIYKVFRRLLYKSVF

SEQ ID NO: 275195 - protein, 15 aa, Artificial Sequence
  Description of Artificial Sequence: Synthetic peptide
  Seed: SIGKVCRTLLAKSVF
SIYKVFRSLLAKSVF

SEQ ID NO: 275196 - protein, 15 aa, Artificial Sequence
  Description of Artificial Sequence: Synthetic peptide
  Seed: SIGKVCRTLLAKSVF
SIYKVFRSLLDKSVF

SEQ ID NO: 275197 - protein, 15 aa, Artificial Sequence
  Description of Artificial Sequence: Synthetic peptide
  Seed: SIGKVCRTLLAKSVF
SIYKVFRSLLEKSVF

SEQ ID NO: 275198 - protein, 15 aa, Artificial Sequence
  Description of Artificial Sequence: Synthetic peptide
  Seed: SIGKVCRTLLAKSVF
SIYKVFRSLLGKSVF

SEQ ID NO: 275199 - protein, 15 aa, Artificial Sequence
  Description of Artificial Sequence: Synthetic peptide
  Seed: SIGKVCRTLLAKSVF
SIYKVFRSLLHKSVF

SEQ ID NO: 275200 - protein, 15 aa, Artificial Sequence
  Description of Artificial Sequence: Synthetic peptide
  Seed: SIGKVCRTLLAKSVF
SIYKVFRSLLNKSVF

SEQ ID NO: 275201 - protein, 15 aa, Artificial Sequence
  Description of Artificial Sequence: Synthetic peptide
  Seed: SIGKVCRTLLAKSVF
SIYKVFRSLLSKSVF

SEQ ID NO: 275202 - protein, 15 aa, Artificial Sequence
  Description of Artificial Sequence: Synthetic peptide
  Seed: SIGKVCRTLLAKSVF
SIYKVFRSLLTKSVF

SEQ ID NO: 275203 - protein, 15 aa, Artificial Sequence
  Description of Artificial Sequence: Synthetic peptide
  Seed: SIGKVCRTLLAKSVF
SIYKVFRTLLAKSVF

SEQ ID NO: 275204 - protein, 15 aa, Artificial Sequence
  Description of Artificial Sequence: Synthetic peptide
  Seed: SIGKVCRTLLAKSVF
SIYKVFRTLLDKSVF

SEQ ID NO: 275205 - protein, 15 aa, Artificial Sequence
  Description of Artificial Sequence: Synthetic peptide
  Seed: SIGKVCRTLLAKSVF
SIYKVFRTLLEKSVF

SEQ ID NO: 275206 - protein, 15 aa, Artificial Sequence
  Description of Artificial Sequence: Synthetic peptide
  Seed: SIGKVCRTLLAKSVF
SIYKVFRTLLGKSVF

SEQ ID NO: 275207 - protein, 15 aa, Artificial Sequence
  Description of Artificial Sequence: Synthetic peptide
  Seed: SIGKVCRTLLAKSVF
SIYKVFRTLLHKSVF

SEQ ID NO: 275208 - protein, 15 aa, Artificial Sequence
  Description of Artificial Sequence: Synthetic peptide
  Seed: SIGKVCRTLLAKSVF
SIYKVFRTLLKKSVF

SEQ ID NO: 275209 - protein, 15 aa, Artificial Sequence
  Description of Artificial Sequence: Synthetic peptide
  Seed: SIGKVCRTLLAKSVF
SIYKVFRTLLNKSVF

SEQ ID NO: 275210 - protein, 15 aa, Artificial Sequence
  Description of Artificial Sequence: Synthetic peptide
  Seed: SIGKVCRTLLAKSVF
SIYKVFRTLLRKSVF

SEQ ID NO: 275211 - protein, 15 aa, Artificial Sequence
  Description of Artificial Sequence: Synthetic peptide
  Seed: SIGKVCRTLLAKSVF
SIYKVFRTLLSKSVF

SEQ ID NO: 275212 - protein, 15 aa, Artificial Sequence
  Description of Artificial Sequence: Synthetic peptide
  Seed: SIGKVCRTLLAKSVF
SIYKVFRTLLTKSVF

SEQ ID NO: 275213 - protein, 15 aa, Artificial Sequence
  Description of Artificial Sequence: Synthetic peptide
  Seed: SIGKVCRTLLAKSVF
SIYKVFRVLLDKSVF

SEQ ID NO: 275214 - protein, 15 aa, Artificial Sequence
  Description of Artificial Sequence: Synthetic peptide
  Seed: SIGKVCRTLLAKSVF
SIYKVFRVLLHKSVF

SEQ ID NO: 275215 - protein, 15 aa, Artificial Sequence
  Description of Artificial Sequence: Synthetic peptide
  Seed: SIGKVCRTLLAKSVF
SIYKVFRVLLSKSVF

SEQ ID NO: 275216 - protein, 15 aa, Artificial Sequence
  Description of Artificial Sequence: Synthetic peptide
  Seed: SIGKVCRTLLAKSVF
SIYKVGRALLSKSVF

SEQ ID NO: 275217 - protein, 15 aa, Artificial Sequence
  Description of Artificial Sequence: Synthetic peptide
  Seed: SIGKVCRTLLAKSVF
SIYKVGRHLLAKSVF

SEQ ID NO: 275218 - protein, 15 aa, Artificial Sequence
  Description of Artificial Sequence: Synthetic peptide
  Seed: SIGKVCRTLLAKSVF
SIYKVGRHLLSKSVF

SEQ ID NO: 275219 - protein, 15 aa, Artificial Sequence
  Description of Artificial Sequence: Synthetic peptide
  Seed: SIGKVCRTLLAKSVF
SIYKVGRKLLAKSVF

SEQ ID NO: 275220 - protein, 15 aa, Artificial Sequence
  Description of Artificial Sequence: Synthetic peptide
  Seed: SIGKVCRTLLAKSVF
SIYKVGRKLLGKSVF

SEQ ID NO: 275221 - protein, 15 aa, Artificial Sequence
  Description of Artificial Sequence: Synthetic peptide
  Seed: SIGKVCRTLLAKSVF
SIYKVGRKLLHKSVF

SEQ ID NO: 275222 - protein, 15 aa, Artificial Sequence
  Description of Artificial Sequence: Synthetic peptide
  Seed: SIGKVCRTLLAKSVF
SIYKVGRKLLIKSVF

SEQ ID NO: 275223 - protein, 15 aa, Artificial Sequence
  Description of Artificial Sequence: Synthetic peptide
  Seed: SIGKVCRTLLAKSVF
SIYKVGRKLLKKSVF

SEQ ID NO: 275224 - protein, 15 aa, Artificial Sequence
  Description of Artificial Sequence: Synthetic peptide
  Seed: SIGKVCRTLLAKSVF
SIYKVGRKLLLKSVF

SEQ ID NO: 275225 - protein, 15 aa, Artificial Sequence
  Description of Artificial Sequence: Synthetic peptide
  Seed: SIGKVCRTLLAKSVF
SIYKVGRKLLMKSVF

SEQ ID NO: 275226 - protein, 15 aa, Artificial Sequence
  Description of Artificial Sequence: Synthetic peptide
  Seed: SIGKVCRTLLAKSVF
SIYKVGRKLLNKSVF

SEQ ID NO: 275227 - protein, 15 aa, Artificial Sequence
  Description of Artificial Sequence: Synthetic peptide
  Seed: SIGKVCRTLLAKSVF
SIYKVGRKLLPKSVF

SEQ ID NO: 275228 - protein, 15 aa, Artificial Sequence
  Description of Artificial Sequence: Synthetic peptide
  Seed: SIGKVCRTLLAKSVF
SIYKVGRKLLQKSVF

SEQ ID NO: 275229 - protein, 15 aa, Artificial Sequence
  Description of Artificial Sequence: Synthetic peptide
  Seed: SIGKVCRTLLAKSVF
SIYKVGRKLLRKSVF

SEQ ID NO: 275230 - protein, 15 aa, Artificial Sequence
  Description of Artificial Sequence: Synthetic peptide
  Seed: SIGKVCRTLLAKSVF
SIYKVGRKLLSKSVF

SEQ ID NO: 275231 - protein, 15 aa, Artificial Sequence
  Description of Artificial Sequence: Synthetic peptide
  Seed: SIGKVCRTLLAKSVF
SIYKVGRKLLTKSVF

SEQ ID NO: 275232 - protein, 15 aa, Artificial Sequence
  Description of Artificial Sequence: Synthetic peptide
  Seed: SIGKVCRTLLAKSVF
SIYKVGRKLLVKSVF

SEQ ID NO: 275233 - protein, 15 aa, Artificial Sequence
  Description of Artificial Sequence: Synthetic peptide
  Seed: SIGKVCRTLLAKSVF
SIYKVGRKLLYKSVF

SEQ ID NO: 275234 - protein, 15 aa, Artificial Sequence
  Description of Artificial Sequence: Synthetic peptide
  Seed: SIGKVCRTLLAKSVF
SIYKVGRNLLAKSVF

SEQ ID NO: 275235 - protein, 15 aa, Artificial Sequence
  Description of Artificial Sequence: Synthetic peptide
  Seed: SIGKVCRTLLAKSVF
SIYKVGRNLLSKSVF

SEQ ID NO: 275236 - protein, 15 aa, Artificial Sequence
  Description of Artificial Sequence: Synthetic peptide
  Seed: SIGKVCRTLLAKSVF
SIYKVGRRLLAKSVF

SEQ ID NO: 275237 - protein, 15 aa, Artificial Sequence
  Description of Artificial Sequence: Synthetic peptide
  Seed: SIGKVCRTLLAKSVF
SIYKVGRRLLCKSVF

SEQ ID NO: 275238 - protein, 15 aa, Artificial Sequence
  Description of Artificial Sequence: Synthetic peptide
  Seed: SIGKVCRTLLAKSVF
SIYKVGRRLLDKSVF

SEQ ID NO: 275239 - protein, 15 aa, Artificial Sequence
  Description of Artificial Sequence: Synthetic peptide
  Seed: SIGKVCRTLLAKSVF
SIYKVGRRLLEKSVF

SEQ ID NO: 275240 - protein, 15 aa, Artificial Sequence
  Description of Artificial Sequence: Synthetic peptide
  Seed: SIGKVCRTLLAKSVF
SIYKVGRRLLGKSVF

SEQ ID NO: 275241 - protein, 15 aa, Artificial Sequence
  Description of Artificial Sequence: Synthetic peptide
  Seed: SIGKVCRTLLAKSVF
SIYKVGRRLLHKSVF

SEQ ID NO: 275242 - protein, 15 aa, Artificial Sequence
  Description of Artificial Sequence: Synthetic peptide
  Seed: SIGKVCRTLLAKSVF
SIYKVGRRLLIKSVF

SEQ ID NO: 275243 - protein, 15 aa, Artificial Sequence
  Description of Artificial Sequence: Synthetic peptide
  Seed: SIGKVCRTLLAKSVF
SIYKVGRRLLKKSVF

SEQ ID NO: 275244 - protein, 15 aa, Artificial Sequence
  Description of Artificial Sequence: Synthetic peptide
  Seed: SIGKVCRTLLAKSVF
SIYKVGRRLLLKSVF

SEQ ID NO: 275245 - protein, 15 aa, Artificial Sequence
  Description of Artificial Sequence: Synthetic peptide
  Seed: SIGKVCRTLLAKSVF
SIYKVGRRLLMKSVF

SEQ ID NO: 275246 - protein, 15 aa, Artificial Sequence
  Description of Artificial Sequence: Synthetic peptide
  Seed: SIGKVCRTLLAKSVF
SIYKVGRRLLNKSVF

SEQ ID NO: 275247 - protein, 15 aa, Artificial Sequence
  Description of Artificial Sequence: Synthetic peptide
  Seed: SIGKVCRTLLAKSVF
SIYKVGRRLLPKSVF

SEQ ID NO: 275248 - protein, 15 aa, Artificial Sequence
  Description of Artificial Sequence: Synthetic peptide
  Seed: SIGKVCRTLLAKSVF
SIYKVGRRLLQKSVF

SEQ ID NO: 275249 - protein, 15 aa, Artificial Sequence
  Description of Artificial Sequence: Synthetic peptide
  Seed: SIGKVCRTLLAKSVF
SIYKVGRRLLRKSVF

SEQ ID NO: 275250 - protein, 15 aa, Artificial Sequence
  Description of Artificial Sequence: Synthetic peptide
  Seed: SIGKVCRTLLAKSVF
SIYKVGRRLLSKSVF

SEQ ID NO: 275251 - protein, 15 aa, Artificial Sequence
  Description of Artificial Sequence: Synthetic peptide
  Seed: SIGKVCRTLLAKSVF
SIYKVGRRLLTKSVF

SEQ ID NO: 275252 - protein, 15 aa, Artificial Sequence
  Description of Artificial Sequence: Synthetic peptide
  Seed: SIGKVCRTLLAKSVF
SIYKVGRRLLVKSVF

SEQ ID NO: 275253 - protein, 15 aa, Artificial Sequence
  Description of Artificial Sequence: Synthetic peptide
  Seed: SIGKVCRTLLAKSVF
SIYKVGRRLLYKSVF

SEQ ID NO: 275254 - protein, 15 aa, Artificial Sequence
  Description of Artificial Sequence: Synthetic peptide
  Seed: SIGKVCRTLLAKSVF
SIYKVGRSLLSKSVF

SEQ ID NO: 275255 - protein, 15 aa, Artificial Sequence
  Description of Artificial Sequence: Synthetic peptide
  Seed: SIGKVCRTLLAKSVF
SIYKVGRTLLAKSVF

SEQ ID NO: 275256 - protein, 15 aa, Artificial Sequence
  Description of Artificial Sequence: Synthetic peptide
  Seed: SIGKVCRTLLAKSVF
SIYKVGRTLLSKSVF

SEQ ID NO: 275257 - protein, 15 aa, Artificial Sequence
  Description of Artificial Sequence: Synthetic peptide
  Seed: SIGKVCRTLLAKSVF
SIYKVHRALLAKSVF

SEQ ID NO: 275258 - protein, 15 aa, Artificial Sequence
  Description of Artificial Sequence: Synthetic peptide
  Seed: SIGKVCRTLLAKSVF
SIYKVHRALLGKSVF

SEQ ID NO: 275259 - protein, 15 aa, Artificial Sequence
  Description of Artificial Sequence: Synthetic peptide
  Seed: SIGKVCRTLLAKSVF
SIYKVHRALLHKSVF

SEQ ID NO: 275260 - protein, 15 aa, Artificial Sequence
  Description of Artificial Sequence: Synthetic peptide
  Seed: SIGKVCRTLLAKSVF
SIYKVHRALLQKSVF

SEQ ID NO: 275261 - protein, 15 aa, Artificial Sequence
  Description of Artificial Sequence: Synthetic peptide
  Seed: SIGKVCRTLLAKSVF
SIYKVHRALLRKSVF

SEQ ID NO: 275262 - protein, 15 aa, Artificial Sequence
  Description of Artificial Sequence: Synthetic peptide
  Seed: SIGKVCRTLLAKSVF
SIYKVHRALLSKSVF

SEQ ID NO: 275263 - protein, 15 aa, Artificial Sequence
  Description of Artificial Sequence: Synthetic peptide
  Seed: SIGKVCRTLLAKSVF
SIYKVHRHLLAKSVF

SEQ ID NO: 275264 - protein, 15 aa, Artificial Sequence
  Description of Artificial Sequence: Synthetic peptide
  Seed: SIGKVCRTLLAKSVF
SIYKVHRHLLGKSVF

SEQ ID NO: 275265 - protein, 15 aa, Artificial Sequence
  Description of Artificial Sequence: Synthetic peptide
  Seed: SIGKVCRTLLAKSVF
SIYKVHRHLLQKSVF

SEQ ID NO: 275266 - protein, 15 aa, Artificial Sequence
  Description of Artificial Sequence: Synthetic peptide
  Seed: SIGKVCRTLLAKSVF
SIYKVHRHLLSKSVF

SEQ ID NO: 275267 - protein, 15 aa, Artificial Sequence
  Description of Artificial Sequence: Synthetic peptide
  Seed: SIGKVCRTLLAKSVF
SIYKVHRILLGKSVF

SEQ ID NO: 275268 - protein, 15 aa, Artificial Sequence
  Description of Artificial Sequence: Synthetic peptide
  Seed: SIGKVCRTLLAKSVF
SIYKVHRKLLAKSVF

SEQ ID NO: 275269 - protein, 15 aa, Artificial Sequence
  Description of Artificial Sequence: Synthetic peptide
  Seed: SIGKVCRTLLAKSVF
SIYKVHRKLLFKSVF

SEQ ID NO: 275270 - protein, 15 aa, Artificial Sequence
  Description of Artificial Sequence: Synthetic peptide
  Seed: SIGKVCRTLLAKSVF
SIYKVHRKLLGKSVF

SEQ ID NO: 275271 - protein, 15 aa, Artificial Sequence
  Description of Artificial Sequence: Synthetic peptide
  Seed: SIGKVCRTLLAKSVF
SIYKVHRKLLHKSVF

SEQ ID NO: 275272 - protein, 15 aa, Artificial Sequence
  Description of Artificial Sequence: Synthetic peptide
  Seed: SIGKVCRTLLAKSVF
SIYKVHRKLLIKSVF

SEQ ID NO: 275273 - protein, 15 aa, Artificial Sequence
  Description of Artificial Sequence: Synthetic peptide
  Seed: SIGKVCRTLLAKSVF
SIYKVHRKLLKKSVF

SEQ ID NO: 275274 - protein, 15 aa, Artificial Sequence
  Description of Artificial Sequence: Synthetic peptide
  Seed: SIGKVCRTLLAKSVF
SIYKVHRKLLLKSVF

SEQ ID NO: 275275 - protein, 15 aa, Artificial Sequence
  Description of Artificial Sequence: Synthetic peptide
  Seed: SIGKVCRTLLAKSVF
SIYKVHRKLLMKSVF

SEQ ID NO: 275276 - protein, 15 aa, Artificial Sequence
  Description of Artificial Sequence: Synthetic peptide
  Seed: SIGKVCRTLLAKSVF
SIYKVHRKLLNKSVF

SEQ ID NO: 275277 - protein, 15 aa, Artificial Sequence
  Description of Artificial Sequence: Synthetic peptide
  Seed: SIGKVCRTLLAKSVF
SIYKVHRKLLPKSVF

SEQ ID NO: 275278 - protein, 15 aa, Artificial Sequence
  Description of Artificial Sequence: Synthetic peptide
  Seed: SIGKVCRTLLAKSVF
SIYKVHRKLLQKSVF

SEQ ID NO: 275279 - protein, 15 aa, Artificial Sequence
  Description of Artificial Sequence: Synthetic peptide
  Seed: SIGKVCRTLLAKSVF
SIYKVHRKLLRKSVF

SEQ ID NO: 275280 - protein, 15 aa, Artificial Sequence
  Description of Artificial Sequence: Synthetic peptide
  Seed: SIGKVCRTLLAKSVF
SIYKVHRKLLSKSVF

SEQ ID NO: 275281 - protein, 15 aa, Artificial Sequence
  Description of Artificial Sequence: Synthetic peptide
  Seed: SIGKVCRTLLAKSVF
SIYKVHRKLLTKSVF

SEQ ID NO: 275282 - protein, 15 aa, Artificial Sequence
  Description of Artificial Sequence: Synthetic peptide
  Seed: SIGKVCRTLLAKSVF
SIYKVHRKLLVKSVF

SEQ ID NO: 275283 - protein, 15 aa, Artificial Sequence
  Description of Artificial Sequence: Synthetic peptide
  Seed: SIGKVCRTLLAKSVF
SIYKVHRKLLWKSVF

SEQ ID NO: 275284 - protein, 15 aa, Artificial Sequence
  Description of Artificial Sequence: Synthetic peptide
  Seed: SIGKVCRTLLAKSVF
SIYKVHRKLLYKSVF

SEQ ID NO: 275285 - protein, 15 aa, Artificial Sequence
  Description of Artificial Sequence: Synthetic peptide
  Seed: SIGKVCRTLLAKSVF
SIYKVHRMLLRKSVF

SEQ ID NO: 275286 - protein, 15 aa, Artificial Sequence
  Description of Artificial Sequence: Synthetic peptide
  Seed: SIGKVCRTLLAKSVF
SIYKVHRNLLAKSVF

SEQ ID NO: 275287 - protein, 15 aa, Artificial Sequence
  Description of Artificial Sequence: Synthetic peptide
  Seed: SIGKVCRTLLAKSVF
SIYKVHRQLLAKSVF

SEQ ID NO: 275288 - protein, 15 aa, Artificial Sequence
  Description of Artificial Sequence: Synthetic peptide
  Seed: SIGKVCRTLLAKSVF
SIYKVHRQLLSKSVF

SEQ ID NO: 275289 - protein, 15 aa, Artificial Sequence
  Description of Artificial Sequence: Synthetic peptide
  Seed: SIGKVCRTLLAKSVF
SIYKVHRRLLAKSVF

SEQ ID NO: 275290 - protein, 15 aa, Artificial Sequence
  Description of Artificial Sequence: Synthetic peptide
  Seed: SIGKVCRTLLAKSVF
SIYKVHRRLLCKSVF

SEQ ID NO: 275291 - protein, 15 aa, Artificial Sequence
  Description of Artificial Sequence: Synthetic peptide
  Seed: SIGKVCRTLLAKSVF
SIYKVHRRLLDKSVF

SEQ ID NO: 275292 - protein, 15 aa, Artificial Sequence
  Description of Artificial Sequence: Synthetic peptide
  Seed: SIGKVCRTLLAKSVF
SIYKVHRRLLEKSVF

SEQ ID NO: 275293 - protein, 15 aa, Artificial Sequence
  Description of Artificial Sequence: Synthetic peptide
  Seed: SIGKVCRTLLAKSVF
SIYKVHRRLLFKSVF

SEQ ID NO: 275294 - protein, 15 aa, Artificial Sequence
  Description of Artificial Sequence: Synthetic peptide
  Seed: SIGKVCRTLLAKSVF
SIYKVHRRLLGKSVF

SEQ ID NO: 275295 - protein, 15 aa, Artificial Sequence
  Description of Artificial Sequence: Synthetic peptide
  Seed: SIGKVCRTLLAKSVF
SIYKVHRRLLHKSVF

SEQ ID NO: 275296 - protein, 15 aa, Artificial Sequence
  Description of Artificial Sequence: Synthetic peptide
  Seed: SIGKVCRTLLAKSVF
SIYKVHRRLLIKSVF

SEQ ID NO: 275297 - protein, 15 aa, Artificial Sequence
  Description of Artificial Sequence: Synthetic peptide
  Seed: SIGKVCRTLLAKSVF
SIYKVHRRLLKKSVF

SEQ ID NO: 275298 - protein, 15 aa, Artificial Sequence
  Description of Artificial Sequence: Synthetic peptide
  Seed: SIGKVCRTLLAKSVF
SIYKVHRRLLLKSVF

SEQ ID NO: 275299 - protein, 15 aa, Artificial Sequence
  Description of Artificial Sequence: Synthetic peptide
  Seed: SIGKVCRTLLAKSVF
SIYKVHRRLLMKSVF

SEQ ID NO: 275300 - protein, 15 aa, Artificial Sequence
  Description of Artificial Sequence: Synthetic peptide
  Seed: SIGKVCRTLLAKSVF
SIYKVHRRLLNKSVF

SEQ ID NO: 275301 - protein, 15 aa, Artificial Sequence
  Description of Artificial Sequence: Synthetic peptide
  Seed: SIGKVCRTLLAKSVF
SIYKVHRRLLPKSVF

SEQ ID NO: 275302 - protein, 15 aa, Artificial Sequence
  Description of Artificial Sequence: Synthetic peptide
  Seed: SIGKVCRTLLAKSVF
SIYKVHRRLLQKSVF

SEQ ID NO: 275303 - protein, 15 aa, Artificial Sequence
  Description of Artificial Sequence: Synthetic peptide
  Seed: SIGKVCRTLLAKSVF
SIYKVHRRLLRKSVF

SEQ ID NO: 275304 - protein, 15 aa, Artificial Sequence
  Description of Artificial Sequence: Synthetic peptide
  Seed: SIGKVCRTLLAKSVF
SIYKVHRRLLSKSVF

SEQ ID NO: 275305 - protein, 15 aa, Artificial Sequence
  Description of Artificial Sequence: Synthetic peptide
  Seed: SIGKVCRTLLAKSVF
SIYKVHRRLLTKSVF

SEQ ID NO: 275306 - protein, 15 aa, Artificial Sequence
  Description of Artificial Sequence: Synthetic peptide
  Seed: SIGKVCRTLLAKSVF
SIYKVHRRLLVKSVF

SEQ ID NO: 275307 - protein, 15 aa, Artificial Sequence
  Description of Artificial Sequence: Synthetic peptide
  Seed: SIGKVCRTLLAKSVF
SIYKVHRRLLYKSVF

SEQ ID NO: 275308 - protein, 15 aa, Artificial Sequence
  Description of Artificial Sequence: Synthetic peptide
  Seed: SIGKVCRTLLAKSVF
SIYKVHRSLLAKSVF

SEQ ID NO: 275309 - protein, 15 aa, Artificial Sequence
  Description of Artificial Sequence: Synthetic peptide
  Seed: SIGKVCRTLLAKSVF
SIYKVHRSLLQKSVF

SEQ ID NO: 275310 - protein, 15 aa, Artificial Sequence
  Description of Artificial Sequence: Synthetic peptide
  Seed: SIGKVCRTLLAKSVF
SIYKVHRSLLRKSVF

SEQ ID NO: 275311 - protein, 15 aa, Artificial Sequence
  Description of Artificial Sequence: Synthetic peptide
  Seed: SIGKVCRTLLAKSVF
SIYKVHRSLLSKSVF

SEQ ID NO: 275312 - protein, 15 aa, Artificial Sequence
  Description of Artificial Sequence: Synthetic peptide
  Seed: SIGKVCRTLLAKSVF
SIYKVHRSLLYKSVF

SEQ ID NO: 275313 - protein, 15 aa, Artificial Sequence
  Description of Artificial Sequence: Synthetic peptide
  Seed: SIGKVCRTLLAKSVF
SIYKVHRTLLAKSVF

SEQ ID NO: 275314 - protein, 15 aa, Artificial Sequence
  Description of Artificial Sequence: Synthetic peptide
  Seed: SIGKVCRTLLAKSVF
SIYKVHRTLLHKSVF

SEQ ID NO: 275315 - protein, 15 aa, Artificial Sequence
  Description of Artificial Sequence: Synthetic peptide
  Seed: SIGKVCRTLLAKSVF
SIYKVHRTLLKKSVF

SEQ ID NO: 275316 - protein, 15 aa, Artificial Sequence
  Description of Artificial Sequence: Synthetic peptide
  Seed: SIGKVCRTLLAKSVF
SIYKVHRTLLQKSVF

SEQ ID NO: 275317 - protein, 15 aa, Artificial Sequence
  Description of Artificial Sequence: Synthetic peptide
  Seed: SIGKVCRTLLAKSVF
SIYKVHRTLLRKSVF

SEQ ID NO: 275318 - protein, 15 aa, Artificial Sequence
  Description of Artificial Sequence: Synthetic peptide
  Seed: SIGKVCRTLLAKSVF
SIYKVHRTLLSKSVF

SEQ ID NO: 275319 - protein, 15 aa, Artificial Sequence
  Description of Artificial Sequence: Synthetic peptide
  Seed: SIGKVCRTLLAKSVF
SIYKVHRVLLAKSVF

SEQ ID NO: 275320 - protein, 15 aa, Artificial Sequence
  Description of Artificial Sequence: Synthetic peptide
  Seed: SIGKVCRTLLAKSVF
SIYKVHRVLLGKSVF

SEQ ID NO: 275321 - protein, 15 aa, Artificial Sequence
  Description of Artificial Sequence: Synthetic peptide
  Seed: SIGKVCRTLLAKSVF
SIYKVHRVLLQKSVF

SEQ ID NO: 275322 - protein, 15 aa, Artificial Sequence
  Description of Artificial Sequence: Synthetic peptide
  Seed: SIGKVCRTLLAKSVF
SIYKVHRVLLRKSVF

SEQ ID NO: 275323 - protein, 15 aa, Artificial Sequence
  Description of Artificial Sequence: Synthetic peptide
  Seed: SIGKVCRTLLAKSVF
SIYKVHRVLLSKSVF

SEQ ID NO: 275324 - protein, 15 aa, Artificial Sequence
  Description of Artificial Sequence: Synthetic peptide
  Seed: SIGKVCRTLLAKSVF
SIYKVIRALLAKSVF

SEQ ID NO: 275325 - protein, 15 aa, Artificial Sequence
  Description of Artificial Sequence: Synthetic peptide
  Seed: SIGKVCRTLLAKSVF
SIYKVIRALLDKSVF

SEQ ID NO: 275326 - protein, 15 aa, Artificial Sequence
  Description of Artificial Sequence: Synthetic peptide
  Seed: SIGKVCRTLLAKSVF
SIYKVIRALLEKSVF

SEQ ID NO: 275327 - protein, 15 aa, Artificial Sequence
  Description of Artificial Sequence: Synthetic peptide
  Seed: SIGKVCRTLLAKSVF
SIYKVIRALLGKSVF

SEQ ID NO: 275328 - protein, 15 aa, Artificial Sequence
  Description of Artificial Sequence: Synthetic peptide
  Seed: SIGKVCRTLLAKSVF
SIYKVIRALLHKSVF

SEQ ID NO: 275329 - protein, 15 aa, Artificial Sequence
  Description of Artificial Sequence: Synthetic peptide
  Seed: SIGKVCRTLLAKSVF
SIYKVIRALLNKSVF

SEQ ID NO: 275330 - protein, 15 aa, Artificial Sequence
  Description of Artificial Sequence: Synthetic peptide
  Seed: SIGKVCRTLLAKSVF
SIYKVIRALLPKSVF

SEQ ID NO: 275331 - protein, 15 aa, Artificial Sequence
  Description of Artificial Sequence: Synthetic peptide
  Seed: SIGKVCRTLLAKSVF
SIYKVIRALLQKSVF

SEQ ID NO: 275332 - protein, 15 aa, Artificial Sequence
  Description of Artificial Sequence: Synthetic peptide
  Seed: SIGKVCRTLLAKSVF
SIYKVIRALLSKSVF

SEQ ID NO: 275333 - protein, 15 aa, Artificial Sequence
  Description of Artificial Sequence: Synthetic peptide
  Seed: SIGKVCRTLLAKSVF
SIYKVIRALLTKSVF

SEQ ID NO: 275334 - protein, 15 aa, Artificial Sequence
  Description of Artificial Sequence: Synthetic peptide
  Seed: SIGKVCRTLLAKSVF
SIYKVIRALLVKSVF

SEQ ID NO: 275335 - protein, 15 aa, Artificial Sequence
  Description of Artificial Sequence: Synthetic peptide
  Seed: SIGKVCRTLLAKSVF
SIYKVIRDLLAKSVF

SEQ ID NO: 275336 - protein, 15 aa, Artificial Sequence
  Description of Artificial Sequence: Synthetic peptide
  Seed: SIGKVCRTLLAKSVF
SIYKVIRDLLDKSVF

SEQ ID NO: 275337 - protein, 15 aa, Artificial Sequence
  Description of Artificial Sequence: Synthetic peptide
  Seed: SIGKVCRTLLAKSVF
SIYKVIRDLLEKSVF

SEQ ID NO: 275338 - protein, 15 aa, Artificial Sequence
  Description of Artificial Sequence: Synthetic peptide
  Seed: SIGKVCRTLLAKSVF
SIYKVIRDLLSKSVF

SEQ ID NO: 275339 - protein, 15 aa, Artificial Sequence
  Description of Artificial Sequence: Synthetic peptide
  Seed: SIGKVCRTLLAKSVF
SIYKVIRELLSKSVF

SEQ ID NO: 275340 - protein, 15 aa, Artificial Sequence
  Description of Artificial Sequence: Synthetic peptide
  Seed: SIGKVCRTLLAKSVF
SIYKVIRGLLAKSVF

SEQ ID NO: 275341 - protein, 15 aa, Artificial Sequence
  Description of Artificial Sequence: Synthetic peptide
  Seed: SIGKVCRTLLAKSVF
SIYKVIRGLLDKSVF

SEQ ID NO: 275342 - protein, 15 aa, Artificial Sequence
  Description of Artificial Sequence: Synthetic peptide
  Seed: SIGKVCRTLLAKSVF
SIYKVIRGLLEKSVF

SEQ ID NO: 275343 - protein, 15 aa, Artificial Sequence
  Description of Artificial Sequence: Synthetic peptide
  Seed: SIGKVCRTLLAKSVF
SIYKVIRGLLGKSVF

SEQ ID NO: 275344 - protein, 15 aa, Artificial Sequence
  Description of Artificial Sequence: Synthetic peptide
  Seed: SIGKVCRTLLAKSVF
SIYKVIRGLLHKSVF

SEQ ID NO: 275345 - protein, 15 aa, Artificial Sequence
  Description of Artificial Sequence: Synthetic peptide
  Seed: SIGKVCRTLLAKSVF
SIYKVIRGLLKKSVF

SEQ ID NO: 275346 - protein, 15 aa, Artificial Sequence
  Description of Artificial Sequence: Synthetic peptide
  Seed: SIGKVCRTLLAKSVF
SIYKVIRGLLNKSVF

SEQ ID NO: 275347 - protein, 15 aa, Artificial Sequence
  Description of Artificial Sequence: Synthetic peptide
  Seed: SIGKVCRTLLAKSVF
SIYKVIRGLLQKSVF

SEQ ID NO: 275348 - protein, 15 aa, Artificial Sequence
  Description of Artificial Sequence: Synthetic peptide
  Seed: SIGKVCRTLLAKSVF
SIYKVIRGLLSKSVF

SEQ ID NO: 275349 - protein, 15 aa, Artificial Sequence
  Description of Artificial Sequence: Synthetic peptide
  Seed: SIGKVCRTLLAKSVF
SIYKVIRGLLTKSVF

SEQ ID NO: 275350 - protein, 15 aa, Artificial Sequence
  Description of Artificial Sequence: Synthetic peptide
  Seed: SIGKVCRTLLAKSVF
SIYKVIRGLLVKSVF

SEQ ID NO: 275351 - protein, 15 aa, Artificial Sequence
  Description of Artificial Sequence: Synthetic peptide
  Seed: SIGKVCRTLLAKSVF
SIYKVIRGLLYKSVF

SEQ ID NO: 275352 - protein, 15 aa, Artificial Sequence
  Description of Artificial Sequence: Synthetic peptide
  Seed: SIGKVCRTLLAKSVF
SIYKVIRHLLAKSVF

SEQ ID NO: 275353 - protein, 15 aa, Artificial Sequence
  Description of Artificial Sequence: Synthetic peptide
  Seed: SIGKVCRTLLAKSVF
SIYKVIRHLLGKSVF

SEQ ID NO: 275354 - protein, 15 aa, Artificial Sequence
  Description of Artificial Sequence: Synthetic peptide
  Seed: SIGKVCRTLLAKSVF
SIYKVIRHLLHKSVF

SEQ ID NO: 275355 - protein, 15 aa, Artificial Sequence
  Description of Artificial Sequence: Synthetic peptide
  Seed: SIGKVCRTLLAKSVF
SIYKVIRHLLIKSVF

SEQ ID NO: 275356 - protein, 15 aa, Artificial Sequence
  Description of Artificial Sequence: Synthetic peptide
  Seed: SIGKVCRTLLAKSVF
SIYKVIRHLLKKSVF

SEQ ID NO: 275357 - protein, 15 aa, Artificial Sequence
  Description of Artificial Sequence: Synthetic peptide
  Seed: SIGKVCRTLLAKSVF
SIYKVIRHLLLKSVF

SEQ ID NO: 275358 - protein, 15 aa, Artificial Sequence
  Description of Artificial Sequence: Synthetic peptide
  Seed: SIGKVCRTLLAKSVF
SIYKVIRHLLMKSVF

SEQ ID NO: 275359 - protein, 15 aa, Artificial Sequence
  Description of Artificial Sequence: Synthetic peptide
  Seed: SIGKVCRTLLAKSVF
SIYKVIRHLLNKSVF

SEQ ID NO: 275360 - protein, 15 aa, Artificial Sequence
  Description of Artificial Sequence: Synthetic peptide
  Seed: SIGKVCRTLLAKSVF
SIYKVIRHLLPKSVF

SEQ ID NO: 275361 - protein, 15 aa, Artificial Sequence
  Description of Artificial Sequence: Synthetic peptide
  Seed: SIGKVCRTLLAKSVF
SIYKVIRHLLQKSVF

SEQ ID NO: 275362 - protein, 15 aa, Artificial Sequence
  Description of Artificial Sequence: Synthetic peptide
  Seed: SIGKVCRTLLAKSVF
SIYKVIRHLLRKSVF

SEQ ID NO: 275363 - protein, 15 aa, Artificial Sequence
  Description of Artificial Sequence: Synthetic peptide
  Seed: SIGKVCRTLLAKSVF
SIYKVIRHLLSKSVF

SEQ ID NO: 275364 - protein, 15 aa, Artificial Sequence
  Description of Artificial Sequence: Synthetic peptide
  Seed: SIGKVCRTLLAKSVF
SIYKVIRHLLTKSVF

SEQ ID NO: 275365 - protein, 15 aa, Artificial Sequence
  Description of Artificial Sequence: Synthetic peptide
  Seed: SIGKVCRTLLAKSVF
SIYKVIRHLLVKSVF

SEQ ID NO: 275366 - protein, 15 aa, Artificial Sequence
  Description of Artificial Sequence: Synthetic peptide
  Seed: SIGKVCRTLLAKSVF
SIYKVIRHLLYKSVF

SEQ ID NO: 275367 - protein, 15 aa, Artificial Sequence
  Description of Artificial Sequence: Synthetic peptide
  Seed: SIGKVCRTLLAKSVF
SIYKVIRILLDKSVF

SEQ ID NO: 275368 - protein, 15 aa, Artificial Sequence
  Description of Artificial Sequence: Synthetic peptide
  Seed: SIGKVCRTLLAKSVF
SIYKVIRILLHKSVF

SEQ ID NO: 275369 - protein, 15 aa, Artificial Sequence
  Description of Artificial Sequence: Synthetic peptide
  Seed: SIGKVCRTLLAKSVF
SIYKVIRILLSKSVF

SEQ ID NO: 275370 - protein, 15 aa, Artificial Sequence
  Description of Artificial Sequence: Synthetic peptide
  Seed: SIGKVCRTLLAKSVF
SIYKVIRKLLAKSVF

SEQ ID NO: 275371 - protein, 15 aa, Artificial Sequence
  Description of Artificial Sequence: Synthetic peptide
  Seed: SIGKVCRTLLAKSVF
SIYKVIRKLLCKSVF

SEQ ID NO: 275372 - protein, 15 aa, Artificial Sequence
  Description of Artificial Sequence: Synthetic peptide
  Seed: SIGKVCRTLLAKSVF
SIYKVIRKLLDKSVF

SEQ ID NO: 275373 - protein, 15 aa, Artificial Sequence
  Description of Artificial Sequence: Synthetic peptide
  Seed: SIGKVCRTLLAKSVF
SIYKVIRKLLEKSVF

SEQ ID NO: 275374 - protein, 15 aa, Artificial Sequence
  Description of Artificial Sequence: Synthetic peptide
  Seed: SIGKVCRTLLAKSVF
SIYKVIRKLLFKSVF

SEQ ID NO: 275375 - protein, 15 aa, Artificial Sequence
  Description of Artificial Sequence: Synthetic peptide
  Seed: SIGKVCRTLLAKSVF
SIYKVIRKLLGKSVF

SEQ ID NO: 275376 - protein, 15 aa, Artificial Sequence
  Description of Artificial Sequence: Synthetic peptide
  Seed: SIGKVCRTLLAKSVF
SIYKVIRKLLHKSVF

SEQ ID NO: 275377 - protein, 15 aa, Artificial Sequence
  Description of Artificial Sequence: Synthetic peptide
  Seed: SIGKVCRTLLAKSVF
SIYKVIRKLLIKSVF

SEQ ID NO: 275378 - protein, 15 aa, Artificial Sequence
  Description of Artificial Sequence: Synthetic peptide
  Seed: SIGKVCRTLLAKSVF
SIYKVIRKLLKKSVF

SEQ ID NO: 275379 - protein, 15 aa, Artificial Sequence
  Description of Artificial Sequence: Synthetic peptide
  Seed: SIGKVCRTLLAKSVF
SIYKVIRKLLLKSVF

SEQ ID NO: 275380 - protein, 15 aa, Artificial Sequence
  Description of Artificial Sequence: Synthetic peptide
  Seed: SIGKVCRTLLAKSVF
SIYKVIRKLLMKSVF

SEQ ID NO: 275381 - protein, 15 aa, Artificial Sequence
  Description of Artificial Sequence: Synthetic peptide
  Seed: SIGKVCRTLLAKSVF
SIYKVIRKLLNKSVF

SEQ ID NO: 275382 - protein, 15 aa, Artificial Sequence
  Description of Artificial Sequence: Synthetic peptide
  Seed: SIGKVCRTLLAKSVF
SIYKVIRKLLPKSVF

SEQ ID NO: 275383 - protein, 15 aa, Artificial Sequence
  Description of Artificial Sequence: Synthetic peptide
  Seed: SIGKVCRTLLAKSVF
SIYKVIRKLLQKSVF

SEQ ID NO: 275384 - protein, 15 aa, Artificial Sequence
  Description of Artificial Sequence: Synthetic peptide
  Seed: SIGKVCRTLLAKSVF
SIYKVIRKLLRKSVF

SEQ ID NO: 275385 - protein, 15 aa, Artificial Sequence
  Description of Artificial Sequence: Synthetic peptide
  Seed: SIGKVCRTLLAKSVF
SIYKVIRKLLSKSVF

SEQ ID NO: 275386 - protein, 15 aa, Artificial Sequence
  Description of Artificial Sequence: Synthetic peptide
  Seed: SIGKVCRTLLAKSVF
SIYKVIRKLLTKSVF

SEQ ID NO: 275387 - protein, 15 aa, Artificial Sequence
  Description of Artificial Sequence: Synthetic peptide
  Seed: SIGKVCRTLLAKSVF
SIYKVIRKLLVKSVF

SEQ ID NO: 275388 - protein, 15 aa, Artificial Sequence
  Description of Artificial Sequence: Synthetic peptide
  Seed: SIGKVCRTLLAKSVF
SIYKVIRKLLWKSVF

SEQ ID NO: 275389 - protein, 15 aa, Artificial Sequence
  Description of Artificial Sequence: Synthetic peptide
  Seed: SIGKVCRTLLAKSVF
SIYKVIRKLLYKSVF

SEQ ID NO: 275390 - protein, 15 aa, Artificial Sequence
  Description of Artificial Sequence: Synthetic peptide
  Seed: SIGKVCRTLLAKSVF
SIYKVIRMLLHKSVF

SEQ ID NO: 275391 - protein, 15 aa, Artificial Sequence
  Description of Artificial Sequence: Synthetic peptide
  Seed: SIGKVCRTLLAKSVF
SIYKVIRNLLAKSVF

SEQ ID NO: 275392 - protein, 15 aa, Artificial Sequence
  Description of Artificial Sequence: Synthetic peptide
  Seed: SIGKVCRTLLAKSVF
SIYKVIRNLLDKSVF

SEQ ID NO: 275393 - protein, 15 aa, Artificial Sequence
  Description of Artificial Sequence: Synthetic peptide
  Seed: SIGKVCRTLLAKSVF
SIYKVIRNLLEKSVF

SEQ ID NO: 275394 - protein, 15 aa, Artificial Sequence
  Description of Artificial Sequence: Synthetic peptide
  Seed: SIGKVCRTLLAKSVF
SIYKVIRNLLGKSVF

SEQ ID NO: 275395 - protein, 15 aa, Artificial Sequence
  Description of Artificial Sequence: Synthetic peptide
  Seed: SIGKVCRTLLAKSVF
SIYKVIRNLLHKSVF

SEQ ID NO: 275396 - protein, 15 aa, Artificial Sequence
  Description of Artificial Sequence: Synthetic peptide
  Seed: SIGKVCRTLLAKSVF
SIYKVIRNLLIKSVF

SEQ ID NO: 275397 - protein, 15 aa, Artificial Sequence
  Description of Artificial Sequence: Synthetic peptide
  Seed: SIGKVCRTLLAKSVF
SIYKVIRNLLKKSVF

SEQ ID NO: 275398 - protein, 15 aa, Artificial Sequence
  Description of Artificial Sequence: Synthetic peptide
  Seed: SIGKVCRTLLAKSVF
SIYKVIRNLLMKSVF

SEQ ID NO: 275399 - protein, 15 aa, Artificial Sequence
  Description of Artificial Sequence: Synthetic peptide
  Seed: SIGKVCRTLLAKSVF
SIYKVIRNLLNKSVF

SEQ ID NO: 275400 - protein, 15 aa, Artificial Sequence
  Description of Artificial Sequence: Synthetic peptide
  Seed: SIGKVCRTLLAKSVF
SIYKVIRNLLPKSVF

SEQ ID NO: 275401 - protein, 15 aa, Artificial Sequence
  Description of Artificial Sequence: Synthetic peptide
  Seed: SIGKVCRTLLAKSVF
SIYKVIRNLLQKSVF

SEQ ID NO: 275402 - protein, 15 aa, Artificial Sequence
  Description of Artificial Sequence: Synthetic peptide
  Seed: SIGKVCRTLLAKSVF
SIYKVIRNLLRKSVF

SEQ ID NO: 275403 - protein, 15 aa, Artificial Sequence
  Description of Artificial Sequence: Synthetic peptide
  Seed: SIGKVCRTLLAKSVF
SIYKVIRNLLSKSVF

SEQ ID NO: 275404 - protein, 15 aa, Artificial Sequence
  Description of Artificial Sequence: Synthetic peptide
  Seed: SIGKVCRTLLAKSVF
SIYKVIRNLLTKSVF

SEQ ID NO: 275405 - protein, 15 aa, Artificial Sequence
  Description of Artificial Sequence: Synthetic peptide
  Seed: SIGKVCRTLLAKSVF
SIYKVIRNLLVKSVF

SEQ ID NO: 275406 - protein, 15 aa, Artificial Sequence
  Description of Artificial Sequence: Synthetic peptide
  Seed: SIGKVCRTLLAKSVF
SIYKVIRNLLYKSVF

SEQ ID NO: 275407 - protein, 15 aa, Artificial Sequence
  Description of Artificial Sequence: Synthetic peptide
  Seed: SIGKVCRTLLAKSVF
SIYKVIRPLLAKSVF

SEQ ID NO: 275408 - protein, 15 aa, Artificial Sequence
  Description of Artificial Sequence: Synthetic peptide
  Seed: SIGKVCRTLLAKSVF
SIYKVIRPLLDKSVF

SEQ ID NO: 275409 - protein, 15 aa, Artificial Sequence
  Description of Artificial Sequence: Synthetic peptide
  Seed: SIGKVCRTLLAKSVF
SIYKVIRPLLEKSVF

SEQ ID NO: 275410 - protein, 15 aa, Artificial Sequence
  Description of Artificial Sequence: Synthetic peptide
  Seed: SIGKVCRTLLAKSVF
SIYKVIRPLLGKSVF

SEQ ID NO: 275411 - protein, 15 aa, Artificial Sequence
  Description of Artificial Sequence: Synthetic peptide
  Seed: SIGKVCRTLLAKSVF
SIYKVIRPLLHKSVF

SEQ ID NO: 275412 - protein, 15 aa, Artificial Sequence
  Description of Artificial Sequence: Synthetic peptide
  Seed: SIGKVCRTLLAKSVF
SIYKVIRPLLIKSVF

SEQ ID NO: 275413 - protein, 15 aa, Artificial Sequence
  Description of Artificial Sequence: Synthetic peptide
  Seed: SIGKVCRTLLAKSVF
SIYKVIRPLLKKSVF

SEQ ID NO: 275414 - protein, 15 aa, Artificial Sequence
  Description of Artificial Sequence: Synthetic peptide
  Seed: SIGKVCRTLLAKSVF
SIYKVIRPLLLKSVF

SEQ ID NO: 275415 - protein, 15 aa, Artificial Sequence
  Description of Artificial Sequence: Synthetic peptide
  Seed: SIGKVCRTLLAKSVF
SIYKVIRPLLMKSVF

SEQ ID NO: 275416 - protein, 15 aa, Artificial Sequence
  Description of Artificial Sequence: Synthetic peptide
  Seed: SIGKVCRTLLAKSVF
SIYKVIRPLLNKSVF

SEQ ID NO: 275417 - protein, 15 aa, Artificial Sequence
  Description of Artificial Sequence: Synthetic peptide
  Seed: SIGKVCRTLLAKSVF
SIYKVIRPLLPKSVF

SEQ ID NO: 275418 - protein, 15 aa, Artificial Sequence
  Description of Artificial Sequence: Synthetic peptide
  Seed: SIGKVCRTLLAKSVF
SIYKVIRPLLQKSVF

SEQ ID NO: 275419 - protein, 15 aa, Artificial Sequence
  Description of Artificial Sequence: Synthetic peptide
  Seed: SIGKVCRTLLAKSVF
SIYKVIRPLLSKSVF

SEQ ID NO: 275420 - protein, 15 aa, Artificial Sequence
  Description of Artificial Sequence: Synthetic peptide
  Seed: SIGKVCRTLLAKSVF
SIYKVIRPLLTKSVF

SEQ ID NO: 275421 - protein, 15 aa, Artificial Sequence
  Description of Artificial Sequence: Synthetic peptide
  Seed: SIGKVCRTLLAKSVF
SIYKVIRPLLVKSVF

SEQ ID NO: 275422 - protein, 15 aa, Artificial Sequence
  Description of Artificial Sequence: Synthetic peptide
  Seed: SIGKVCRTLLAKSVF
SIYKVIRPLLYKSVF

SEQ ID NO: 275423 - protein, 15 aa, Artificial Sequence
  Description of Artificial Sequence: Synthetic peptide
  Seed: SIGKVCRTLLAKSVF
SIYKVIRQLLAKSVF

SEQ ID NO: 275424 - protein, 15 aa, Artificial Sequence
  Description of Artificial Sequence: Synthetic peptide
  Seed: SIGKVCRTLLAKSVF
SIYKVIRQLLGKSVF

SEQ ID NO: 275425 - protein, 15 aa, Artificial Sequence
  Description of Artificial Sequence: Synthetic peptide
  Seed: SIGKVCRTLLAKSVF
SIYKVIRQLLHKSVF

SEQ ID NO: 275426 - protein, 15 aa, Artificial Sequence
  Description of Artificial Sequence: Synthetic peptide
  Seed: SIGKVCRTLLAKSVF
SIYKVIRQLLKKSVF

SEQ ID NO: 275427 - protein, 15 aa, Artificial Sequence
  Description of Artificial Sequence: Synthetic peptide
  Seed: SIGKVCRTLLAKSVF
SIYKVIRQLLNKSVF

SEQ ID NO: 275428 - protein, 15 aa, Artificial Sequence
  Description of Artificial Sequence: Synthetic peptide
  Seed: SIGKVCRTLLAKSVF
SIYKVIRQLLQKSVF

SEQ ID NO: 275429 - protein, 15 aa, Artificial Sequence
  Description of Artificial Sequence: Synthetic peptide
  Seed: SIGKVCRTLLAKSVF
SIYKVIRQLLRKSVF

SEQ ID NO: 275430 - protein, 15 aa, Artificial Sequence
  Description of Artificial Sequence: Synthetic peptide
  Seed: SIGKVCRTLLAKSVF
SIYKVIRQLLSKSVF

SEQ ID NO: 275431 - protein, 15 aa, Artificial Sequence
  Description of Artificial Sequence: Synthetic peptide
  Seed: SIGKVCRTLLAKSVF
SIYKVIRQLLTKSVF

SEQ ID NO: 275432 - protein, 15 aa, Artificial Sequence
  Description of Artificial Sequence: Synthetic peptide
  Seed: SIGKVCRTLLAKSVF
SIYKVIRRLLAKSVF

SEQ ID NO: 275433 - protein, 15 aa, Artificial Sequence
  Description of Artificial Sequence: Synthetic peptide
  Seed: SIGKVCRTLLAKSVF
SIYKVIRRLLCKSVF

SEQ ID NO: 275434 - protein, 15 aa, Artificial Sequence
  Description of Artificial Sequence: Synthetic peptide
  Seed: SIGKVCRTLLAKSVF
SIYKVIRRLLDKSVF

SEQ ID NO: 275435 - protein, 15 aa, Artificial Sequence
  Description of Artificial Sequence: Synthetic peptide
  Seed: SIGKVCRTLLAKSVF
SIYKVIRRLLEKSVF

SEQ ID NO: 275436 - protein, 15 aa, Artificial Sequence
  Description of Artificial Sequence: Synthetic peptide
  Seed: SIGKVCRTLLAKSVF
SIYKVIRRLLFKSVF

SEQ ID NO: 275437 - protein, 15 aa, Artificial Sequence
  Description of Artificial Sequence: Synthetic peptide
  Seed: SIGKVCRTLLAKSVF
SIYKVIRRLLGKSVF

SEQ ID NO: 275438 - protein, 15 aa, Artificial Sequence
  Description of Artificial Sequence: Synthetic peptide
  Seed: SIGKVCRTLLAKSVF
SIYKVIRRLLHKSVF

SEQ ID NO: 275439 - protein, 15 aa, Artificial Sequence
  Description of Artificial Sequence: Synthetic peptide
  Seed: SIGKVCRTLLAKSVF
SIYKVIRRLLIKSVF

SEQ ID NO: 275440 - protein, 15 aa, Artificial Sequence
  Description of Artificial Sequence: Synthetic peptide
  Seed: SIGKVCRTLLAKSVF
SIYKVIRRLLKKSVF

SEQ ID NO: 275441 - protein, 15 aa, Artificial Sequence
  Description of Artificial Sequence: Synthetic peptide
  Seed: SIGKVCRTLLAKSVF
SIYKVIRRLLLKSVF

SEQ ID NO: 275442 - protein, 15 aa, Artificial Sequence
  Description of Artificial Sequence: Synthetic peptide
  Seed: SIGKVCRTLLAKSVF
SIYKVIRRLLMKSVF

SEQ ID NO: 275443 - protein, 15 aa, Artificial Sequence
  Description of Artificial Sequence: Synthetic peptide
  Seed: SIGKVCRTLLAKSVF
SIYKVIRRLLNKSVF

SEQ ID NO: 275444 - protein, 15 aa, Artificial Sequence
  Description of Artificial Sequence: Synthetic peptide
  Seed: SIGKVCRTLLAKSVF
SIYKVIRRLLPKSVF

SEQ ID NO: 275445 - protein, 15 aa, Artificial Sequence
  Description of Artificial Sequence: Synthetic peptide
  Seed: SIGKVCRTLLAKSVF
SIYKVIRRLLQKSVF

SEQ ID NO: 275446 - protein, 15 aa, Artificial Sequence
  Description of Artificial Sequence: Synthetic peptide
  Seed: SIGKVCRTLLAKSVF
SIYKVIRRLLRKSVF

SEQ ID NO: 275447 - protein, 15 aa, Artificial Sequence
  Description of Artificial Sequence: Synthetic peptide
  Seed: SIGKVCRTLLAKSVF
SIYKVIRRLLSKSVF

SEQ ID NO: 275448 - protein, 15 aa, Artificial Sequence
  Description of Artificial Sequence: Synthetic peptide
  Seed: SIGKVCRTLLAKSVF
SIYKVIRRLLTKSVF

SEQ ID NO: 275449 - protein, 15 aa, Artificial Sequence
  Description of Artificial Sequence: Synthetic peptide
  Seed: SIGKVCRTLLAKSVF
SIYKVIRRLLVKSVF

SEQ ID NO: 275450 - protein, 15 aa, Artificial Sequence
  Description of Artificial Sequence: Synthetic peptide
  Seed: SIGKVCRTLLAKSVF
SIYKVIRRLLWKSVF

SEQ ID NO: 275451 - protein, 15 aa, Artificial Sequence
  Description of Artificial Sequence: Synthetic peptide
  Seed: SIGKVCRTLLAKSVF
SIYKVIRRLLYKSVF

SEQ ID NO: 275452 - protein, 15 aa, Artificial Sequence
  Description of Artificial Sequence: Synthetic peptide
  Seed: SIGKVCRTLLAKSVF
SIYKVIRSLLAKSVF

SEQ ID NO: 275453 - protein, 15 aa, Artificial Sequence
  Description of Artificial Sequence: Synthetic peptide
  Seed: SIGKVCRTLLAKSVF
SIYKVIRSLLDKSVF

SEQ ID NO: 275454 - protein, 15 aa, Artificial Sequence
  Description of Artificial Sequence: Synthetic peptide
  Seed: SIGKVCRTLLAKSVF
SIYKVIRSLLEKSVF

SEQ ID NO: 275455 - protein, 15 aa, Artificial Sequence
  Description of Artificial Sequence: Synthetic peptide
  Seed: SIGKVCRTLLAKSVF
SIYKVIRSLLGKSVF

SEQ ID NO: 275456 - protein, 15 aa, Artificial Sequence
  Description of Artificial Sequence: Synthetic peptide
  Seed: SIGKVCRTLLAKSVF
SIYKVIRSLLHKSVF

SEQ ID NO: 275457 - protein, 15 aa, Artificial Sequence
  Description of Artificial Sequence: Synthetic peptide
  Seed: SIGKVCRTLLAKSVF
SIYKVIRSLLIKSVF

SEQ ID NO: 275458 - protein, 15 aa, Artificial Sequence
  Description of Artificial Sequence: Synthetic peptide
  Seed: SIGKVCRTLLAKSVF
SIYKVIRSLLKKSVF

SEQ ID NO: 275459 - protein, 15 aa, Artificial Sequence
  Description of Artificial Sequence: Synthetic peptide
  Seed: SIGKVCRTLLAKSVF
SIYKVIRSLLMKSVF

SEQ ID NO: 275460 - protein, 15 aa, Artificial Sequence
  Description of Artificial Sequence: Synthetic peptide
  Seed: SIGKVCRTLLAKSVF
SIYKVIRSLLNKSVF

SEQ ID NO: 275461 - protein, 15 aa, Artificial Sequence
  Description of Artificial Sequence: Synthetic peptide
  Seed: SIGKVCRTLLAKSVF
SIYKVIRSLLPKSVF

SEQ ID NO: 275462 - protein, 15 aa, Artificial Sequence
  Description of Artificial Sequence: Synthetic peptide
  Seed: SIGKVCRTLLAKSVF
SIYKVIRSLLQKSVF

SEQ ID NO: 275463 - protein, 15 aa, Artificial Sequence
  Description of Artificial Sequence: Synthetic peptide
  Seed: SIGKVCRTLLAKSVF
SIYKVIRSLLRKSVF

SEQ ID NO: 275464 - protein, 15 aa, Artificial Sequence
  Description of Artificial Sequence: Synthetic peptide
  Seed: SIGKVCRTLLAKSVF
SIYKVIRSLLSKSVF

SEQ ID NO: 275465 - protein, 15 aa, Artificial Sequence
  Description of Artificial Sequence: Synthetic peptide
  Seed: SIGKVCRTLLAKSVF
SIYKVIRSLLTKSVF

SEQ ID NO: 275466 - protein, 15 aa, Artificial Sequence
  Description of Artificial Sequence: Synthetic peptide
  Seed: SIGKVCRTLLAKSVF
SIYKVIRSLLVKSVF

SEQ ID NO: 275467 - protein, 15 aa, Artificial Sequence
  Description of Artificial Sequence: Synthetic peptide
  Seed: SIGKVCRTLLAKSVF
SIYKVIRSLLYKSVF

SEQ ID NO: 275468 - protein, 15 aa, Artificial Sequence
  Description of Artificial Sequence: Synthetic peptide
  Seed: SIGKVCRTLLAKSVF
SIYKVIRTLLAKSVF

SEQ ID NO: 275469 - protein, 15 aa, Artificial Sequence
  Description of Artificial Sequence: Synthetic peptide
  Seed: SIGKVCRTLLAKSVF
SIYKVIRTLLDKSVF

SEQ ID NO: 275470 - protein, 15 aa, Artificial Sequence
  Description of Artificial Sequence: Synthetic peptide
  Seed: SIGKVCRTLLAKSVF
SIYKVIRTLLEKSVF

SEQ ID NO: 275471 - protein, 15 aa, Artificial Sequence
  Description of Artificial Sequence: Synthetic peptide
  Seed: SIGKVCRTLLAKSVF
SIYKVIRTLLGKSVF

SEQ ID NO: 275472 - protein, 15 aa, Artificial Sequence
  Description of Artificial Sequence: Synthetic peptide
  Seed: SIGKVCRTLLAKSVF
SIYKVIRTLLHKSVF

SEQ ID NO: 275473 - protein, 15 aa, Artificial Sequence
  Description of Artificial Sequence: Synthetic peptide
  Seed: SIGKVCRTLLAKSVF
SIYKVIRTLLIKSVF

SEQ ID NO: 275474 - protein, 15 aa, Artificial Sequence
  Description of Artificial Sequence: Synthetic peptide
  Seed: SIGKVCRTLLAKSVF
SIYKVIRTLLKKSVF

SEQ ID NO: 275475 - protein, 15 aa, Artificial Sequence
  Description of Artificial Sequence: Synthetic peptide
  Seed: SIGKVCRTLLAKSVF
SIYKVIRTLLMKSVF

SEQ ID NO: 275476 - protein, 15 aa, Artificial Sequence
  Description of Artificial Sequence: Synthetic peptide
  Seed: SIGKVCRTLLAKSVF
SIYKVIRTLLNKSVF

SEQ ID NO: 275477 - protein, 15 aa, Artificial Sequence
  Description of Artificial Sequence: Synthetic peptide
  Seed: SIGKVCRTLLAKSVF
SIYKVIRTLLPKSVF

SEQ ID NO: 275478 - protein, 15 aa, Artificial Sequence
  Description of Artificial Sequence: Synthetic peptide
  Seed: SIGKVCRTLLAKSVF
SIYKVIRTLLQKSVF

SEQ ID NO: 275479 - protein, 15 aa, Artificial Sequence
  Description of Artificial Sequence: Synthetic peptide
  Seed: SIGKVCRTLLAKSVF
SIYKVIRTLLRKSVF

SEQ ID NO: 275480 - protein, 15 aa, Artificial Sequence
  Description of Artificial Sequence: Synthetic peptide
  Seed: SIGKVCRTLLAKSVF
SIYKVIRTLLSKSVF

SEQ ID NO: 275481 - protein, 15 aa, Artificial Sequence
  Description of Artificial Sequence: Synthetic peptide
  Seed: SIGKVCRTLLAKSVF
SIYKVIRTLLTKSVF

SEQ ID NO: 275482 - protein, 15 aa, Artificial Sequence
  Description of Artificial Sequence: Synthetic peptide
  Seed: SIGKVCRTLLAKSVF
SIYKVIRTLLVKSVF

SEQ ID NO: 275483 - protein, 15 aa, Artificial Sequence
  Description of Artificial Sequence: Synthetic peptide
  Seed: SIGKVCRTLLAKSVF
SIYKVIRTLLYKSVF

SEQ ID NO: 275484 - protein, 15 aa, Artificial Sequence
  Description of Artificial Sequence: Synthetic peptide
  Seed: SIGKVCRTLLAKSVF
SIYKVIRVLLAKSVF

SEQ ID NO: 275485 - protein, 15 aa, Artificial Sequence
  Description of Artificial Sequence: Synthetic peptide
  Seed: SIGKVCRTLLAKSVF
SIYKVIRVLLDKSVF

SEQ ID NO: 275486 - protein, 15 aa, Artificial Sequence
  Description of Artificial Sequence: Synthetic peptide
  Seed: SIGKVCRTLLAKSVF
SIYKVIRVLLEKSVF

SEQ ID NO: 275487 - protein, 15 aa, Artificial Sequence
  Description of Artificial Sequence: Synthetic peptide
  Seed: SIGKVCRTLLAKSVF
SIYKVIRVLLGKSVF

SEQ ID NO: 275488 - protein, 15 aa, Artificial Sequence
  Description of Artificial Sequence: Synthetic peptide
  Seed: SIGKVCRTLLAKSVF
SIYKVIRVLLHKSVF

SEQ ID NO: 275489 - protein, 15 aa, Artificial Sequence
  Description of Artificial Sequence: Synthetic peptide
  Seed: SIGKVCRTLLAKSVF
SIYKVIRVLLNKSVF

SEQ ID NO: 275490 - protein, 15 aa, Artificial Sequence
  Description of Artificial Sequence: Synthetic peptide
  Seed: SIGKVCRTLLAKSVF
SIYKVIRVLLSKSVF

SEQ ID NO: 275491 - protein, 15 aa, Artificial Sequence
  Description of Artificial Sequence: Synthetic peptide
  Seed: SIGKVCRTLLAKSVF
SIYKVKRALLAKSVF

SEQ ID NO: 275492 - protein, 15 aa, Artificial Sequence
  Description of Artificial Sequence: Synthetic peptide
  Seed: SIGKVCRTLLAKSVF
SIYKVKRALLGKSVF

SEQ ID NO: 275493 - protein, 15 aa, Artificial Sequence
  Description of Artificial Sequence: Synthetic peptide
  Seed: SIGKVCRTLLAKSVF
SIYKVKRALLHKSVF

SEQ ID NO: 275494 - protein, 15 aa, Artificial Sequence
  Description of Artificial Sequence: Synthetic peptide
  Seed: SIGKVCRTLLAKSVF
SIYKVKRALLKKSVF

SEQ ID NO: 275495 - protein, 15 aa, Artificial Sequence
  Description of Artificial Sequence: Synthetic peptide
  Seed: SIGKVCRTLLAKSVF
SIYKVKRALLMKSVF

SEQ ID NO: 275496 - protein, 15 aa, Artificial Sequence
  Description of Artificial Sequence: Synthetic peptide
  Seed: SIGKVCRTLLAKSVF
SIYKVKRALLNKSVF

SEQ ID NO: 275497 - protein, 15 aa, Artificial Sequence
  Description of Artificial Sequence: Synthetic peptide
  Seed: SIGKVCRTLLAKSVF
SIYKVKRALLQKSVF

SEQ ID NO: 275498 - protein, 15 aa, Artificial Sequence
  Description of Artificial Sequence: Synthetic peptide
  Seed: SIGKVCRTLLAKSVF
SIYKVKRALLRKSVF

SEQ ID NO: 275499 - protein, 15 aa, Artificial Sequence
  Description of Artificial Sequence: Synthetic peptide
  Seed: SIGKVCRTLLAKSVF
SIYKVKRALLSKSVF

SEQ ID NO: 275500 - protein, 15 aa, Artificial Sequence
  Description of Artificial Sequence: Synthetic peptide
  Seed: SIGKVCRTLLAKSVF
SIYKVKRALLTKSVF

SEQ ID NO: 275501 - protein, 15 aa, Artificial Sequence
  Description of Artificial Sequence: Synthetic peptide
  Seed: SIGKVCRTLLAKSVF
SIYKVKRALLVKSVF

SEQ ID NO: 275502 - protein, 15 aa, Artificial Sequence
  Description of Artificial Sequence: Synthetic peptide
  Seed: SIGKVCRTLLAKSVF
SIYKVKRGLLAKSVF

SEQ ID NO: 275503 - protein, 15 aa, Artificial Sequence
  Description of Artificial Sequence: Synthetic peptide
  Seed: SIGKVCRTLLAKSVF
SIYKVKRGLLRKSVF

SEQ ID NO: 275504 - protein, 15 aa, Artificial Sequence
  Description of Artificial Sequence: Synthetic peptide
  Seed: SIGKVCRTLLAKSVF
SIYKVKRGLLSKSVF

SEQ ID NO: 275505 - protein, 15 aa, Artificial Sequence
  Description of Artificial Sequence: Synthetic peptide
  Seed: SIGKVCRTLLAKSVF
SIYKVKRHLLAKSVF

SEQ ID NO: 275506 - protein, 15 aa, Artificial Sequence
  Description of Artificial Sequence: Synthetic peptide
  Seed: SIGKVCRTLLAKSVF
SIYKVKRHLLGKSVF

SEQ ID NO: 275507 - protein, 15 aa, Artificial Sequence
  Description of Artificial Sequence: Synthetic peptide
  Seed: SIGKVCRTLLAKSVF
SIYKVKRHLLQKSVF

SEQ ID NO: 275508 - protein, 15 aa, Artificial Sequence
  Description of Artificial Sequence: Synthetic peptide
  Seed: SIGKVCRTLLAKSVF
SIYKVKRHLLSKSVF

SEQ ID NO: 275509 - protein, 15 aa, Artificial Sequence
  Description of Artificial Sequence: Synthetic peptide
  Seed: SIGKVCRTLLAKSVF
SIYKVKRILLKKSVF

SEQ ID NO: 275510 - protein, 15 aa, Artificial Sequence
  Description of Artificial Sequence: Synthetic peptide
  Seed: SIGKVCRTLLAKSVF
SIYKVKRILLRKSVF

SEQ ID NO: 275511 - protein, 15 aa, Artificial Sequence
  Description of Artificial Sequence: Synthetic peptide
  Seed: SIGKVCRTLLAKSVF
SIYKVKRILLSKSVF

SEQ ID NO: 275512 - protein, 15 aa, Artificial Sequence
  Description of Artificial Sequence: Synthetic peptide
  Seed: SIGKVCRTLLAKSVF
SIYKVKRKLLAKSVF

SEQ ID NO: 275513 - protein, 15 aa, Artificial Sequence
  Description of Artificial Sequence: Synthetic peptide
  Seed: SIGKVCRTLLAKSVF
SIYKVKRKLLCKSVF

SEQ ID NO: 275514 - protein, 15 aa, Artificial Sequence
  Description of Artificial Sequence: Synthetic peptide
  Seed: SIGKVCRTLLAKSVF
SIYKVKRKLLDKSVF

SEQ ID NO: 275515 - protein, 15 aa, Artificial Sequence
  Description of Artificial Sequence: Synthetic peptide
  Seed: SIGKVCRTLLAKSVF
SIYKVKRKLLEKSVF

SEQ ID NO: 275516 - protein, 15 aa, Artificial Sequence
  Description of Artificial Sequence: Synthetic peptide
  Seed: SIGKVCRTLLAKSVF
SIYKVKRKLLGKSVF

SEQ ID NO: 275517 - protein, 15 aa, Artificial Sequence
  Description of Artificial Sequence: Synthetic peptide
  Seed: SIGKVCRTLLAKSVF
SIYKVKRKLLHKSVF

SEQ ID NO: 275518 - protein, 15 aa, Artificial Sequence
  Description of Artificial Sequence: Synthetic peptide
  Seed: SIGKVCRTLLAKSVF
SIYKVKRKLLIKSVF

SEQ ID NO: 275519 - protein, 15 aa, Artificial Sequence
  Description of Artificial Sequence: Synthetic peptide
  Seed: SIGKVCRTLLAKSVF
SIYKVKRKLLKKSVF

SEQ ID NO: 275520 - protein, 15 aa, Artificial Sequence
  Description of Artificial Sequence: Synthetic peptide
  Seed: SIGKVCRTLLAKSVF
SIYKVKRKLLLKSVF

SEQ ID NO: 275521 - protein, 15 aa, Artificial Sequence
  Description of Artificial Sequence: Synthetic peptide
  Seed: SIGKVCRTLLAKSVF
SIYKVKRKLLMKSVF

SEQ ID NO: 275522 - protein, 15 aa, Artificial Sequence
  Description of Artificial Sequence: Synthetic peptide
  Seed: SIGKVCRTLLAKSVF
SIYKVKRKLLNKSVF

SEQ ID NO: 275523 - protein, 15 aa, Artificial Sequence
  Description of Artificial Sequence: Synthetic peptide
  Seed: SIGKVCRTLLAKSVF
SIYKVKRKLLPKSVF

SEQ ID NO: 275524 - protein, 15 aa, Artificial Sequence
  Description of Artificial Sequence: Synthetic peptide
  Seed: SIGKVCRTLLAKSVF
SIYKVKRKLLQKSVF

SEQ ID NO: 275525 - protein, 15 aa, Artificial Sequence
  Description of Artificial Sequence: Synthetic peptide
  Seed: SIGKVCRTLLAKSVF
SIYKVKRKLLRKSVF

SEQ ID NO: 275526 - protein, 15 aa, Artificial Sequence
  Description of Artificial Sequence: Synthetic peptide
  Seed: SIGKVCRTLLAKSVF
SIYKVKRKLLSKSVF

SEQ ID NO: 275527 - protein, 15 aa, Artificial Sequence
  Description of Artificial Sequence: Synthetic peptide
  Seed: SIGKVCRTLLAKSVF
SIYKVKRKLLTKSVF

SEQ ID NO: 275528 - protein, 15 aa, Artificial Sequence
  Description of Artificial Sequence: Synthetic peptide
  Seed: SIGKVCRTLLAKSVF
SIYKVKRKLLVKSVF

SEQ ID NO: 275529 - protein, 15 aa, Artificial Sequence
  Description of Artificial Sequence: Synthetic peptide
  Seed: SIGKVCRTLLAKSVF
SIYKVKRKLLWKSVF

SEQ ID NO: 275530 - protein, 15 aa, Artificial Sequence
  Description of Artificial Sequence: Synthetic peptide
  Seed: SIGKVCRTLLAKSVF
SIYKVKRKLLYKSVF

SEQ ID NO: 275531 - protein, 15 aa, Artificial Sequence
  Description of Artificial Sequence: Synthetic peptide
  Seed: SIGKVCRTLLAKSVF
SIYKVKRMLLKKSVF

SEQ ID NO: 275532 - protein, 15 aa, Artificial Sequence
  Description of Artificial Sequence: Synthetic peptide
  Seed: SIGKVCRTLLAKSVF
SIYKVKRMLLRKSVF

SEQ ID NO: 275533 - protein, 15 aa, Artificial Sequence
  Description of Artificial Sequence: Synthetic peptide
  Seed: SIGKVCRTLLAKSVF
SIYKVKRMLLSKSVF

SEQ ID NO: 275534 - protein, 15 aa, Artificial Sequence
  Description of Artificial Sequence: Synthetic peptide
  Seed: SIGKVCRTLLAKSVF
SIYKVKRNLLAKSVF

SEQ ID NO: 275535 - protein, 15 aa, Artificial Sequence
  Description of Artificial Sequence: Synthetic peptide
  Seed: SIGKVCRTLLAKSVF
SIYKVKRNLLGKSVF

SEQ ID NO: 275536 - protein, 15 aa, Artificial Sequence
  Description of Artificial Sequence: Synthetic peptide
  Seed: SIGKVCRTLLAKSVF
SIYKVKRNLLQKSVF

SEQ ID NO: 275537 - protein, 15 aa, Artificial Sequence
  Description of Artificial Sequence: Synthetic peptide
  Seed: SIGKVCRTLLAKSVF
SIYKVKRNLLSKSVF

SEQ ID NO: 275538 - protein, 15 aa, Artificial Sequence
  Description of Artificial Sequence: Synthetic peptide
  Seed: SIGKVCRTLLAKSVF
SIYKVKRPLLAKSVF

SEQ ID NO: 275539 - protein, 15 aa, Artificial Sequence
  Description of Artificial Sequence: Synthetic peptide
  Seed: SIGKVCRTLLAKSVF
SIYKVKRPLLGKSVF

SEQ ID NO: 275540 - protein, 15 aa, Artificial Sequence
  Description of Artificial Sequence: Synthetic peptide
  Seed: SIGKVCRTLLAKSVF
SIYKVKRPLLHKSVF

SEQ ID NO: 275541 - protein, 15 aa, Artificial Sequence
  Description of Artificial Sequence: Synthetic peptide
  Seed: SIGKVCRTLLAKSVF
SIYKVKRPLLKKSVF

SEQ ID NO: 275542 - protein, 15 aa, Artificial Sequence
  Description of Artificial Sequence: Synthetic peptide
  Seed: SIGKVCRTLLAKSVF
SIYKVKRPLLQKSVF

SEQ ID NO: 275543 - protein, 15 aa, Artificial Sequence
  Description of Artificial Sequence: Synthetic peptide
  Seed: SIGKVCRTLLAKSVF
SIYKVKRPLLRKSVF

SEQ ID NO: 275544 - protein, 15 aa, Artificial Sequence
  Description of Artificial Sequence: Synthetic peptide
  Seed: SIGKVCRTLLAKSVF
SIYKVKRPLLSKSVF

SEQ ID NO: 275545 - protein, 15 aa, Artificial Sequence
  Description of Artificial Sequence: Synthetic peptide
  Seed: SIGKVCRTLLAKSVF
SIYKVKRQLLAKSVF

SEQ ID NO: 275546 - protein, 15 aa, Artificial Sequence
  Description of Artificial Sequence: Synthetic peptide
  Seed: SIGKVCRTLLAKSVF
SIYKVKRQLLGKSVF

SEQ ID NO: 275547 - protein, 15 aa, Artificial Sequence
  Description of Artificial Sequence: Synthetic peptide
  Seed: SIGKVCRTLLAKSVF
SIYKVKRQLLQKSVF

SEQ ID NO: 275548 - protein, 15 aa, Artificial Sequence
  Description of Artificial Sequence: Synthetic peptide
  Seed: SIGKVCRTLLAKSVF
SIYKVKRQLLSKSVF

SEQ ID NO: 275549 - protein, 15 aa, Artificial Sequence
  Description of Artificial Sequence: Synthetic peptide
  Seed: SIGKVCRTLLAKSVF
SIYKVKRRLLAKSVF

SEQ ID NO: 275550 - protein, 15 aa, Artificial Sequence
  Description of Artificial Sequence: Synthetic peptide
  Seed: SIGKVCRTLLAKSVF
SIYKVKRRLLCKSVF

SEQ ID NO: 275551 - protein, 15 aa, Artificial Sequence
  Description of Artificial Sequence: Synthetic peptide
  Seed: SIGKVCRTLLAKSVF
SIYKVKRRLLDKSVF

SEQ ID NO: 275552 - protein, 15 aa, Artificial Sequence
  Description of Artificial Sequence: Synthetic peptide
  Seed: SIGKVCRTLLAKSVF
SIYKVKRRLLEKSVF

SEQ ID NO: 275553 - protein, 15 aa, Artificial Sequence
  Description of Artificial Sequence: Synthetic peptide
  Seed: SIGKVCRTLLAKSVF
SIYKVKRRLLFKSVF

SEQ ID NO: 275554 - protein, 15 aa, Artificial Sequence
  Description of Artificial Sequence: Synthetic peptide
  Seed: SIGKVCRTLLAKSVF
SIYKVKRRLLGKSVF

SEQ ID NO: 275555 - protein, 15 aa, Artificial Sequence
  Description of Artificial Sequence: Synthetic peptide
  Seed: SIGKVCRTLLAKSVF
SIYKVKRRLLHKSVF

SEQ ID NO: 275556 - protein, 15 aa, Artificial Sequence
  Description of Artificial Sequence: Synthetic peptide
  Seed: SIGKVCRTLLAKSVF
SIYKVKRRLLIKSVF

SEQ ID NO: 275557 - protein, 15 aa, Artificial Sequence
  Description of Artificial Sequence: Synthetic peptide
  Seed: SIGKVCRTLLAKSVF
SIYKVKRRLLKKSVF

SEQ ID NO: 275558 - protein, 15 aa, Artificial Sequence
  Description of Artificial Sequence: Synthetic peptide
  Seed: SIGKVCRTLLAKSVF
SIYKVKRRLLLKSVF

SEQ ID NO: 275559 - protein, 15 aa, Artificial Sequence
  Description of Artificial Sequence: Synthetic peptide
  Seed: SIGKVCRTLLAKSVF
SIYKVKRRLLMKSVF

SEQ ID NO: 275560 - protein, 15 aa, Artificial Sequence
  Description of Artificial Sequence: Synthetic peptide
  Seed: SIGKVCRTLLAKSVF
SIYKVKRRLLNKSVF

SEQ ID NO: 275561 - protein, 15 aa, Artificial Sequence
  Description of Artificial Sequence: Synthetic peptide
  Seed: SIGKVCRTLLAKSVF
SIYKVKRRLLPKSVF

SEQ ID NO: 275562 - protein, 15 aa, Artificial Sequence
  Description of Artificial Sequence: Synthetic peptide
  Seed: SIGKVCRTLLAKSVF
SIYKVKRRLLQKSVF

SEQ ID NO: 275563 - protein, 15 aa, Artificial Sequence
  Description of Artificial Sequence: Synthetic peptide
  Seed: SIGKVCRTLLAKSVF
SIYKVKRRLLRKSVF

SEQ ID NO: 275564 - protein, 15 aa, Artificial Sequence
  Description of Artificial Sequence: Synthetic peptide
  Seed: SIGKVCRTLLAKSVF
SIYKVKRRLLSKSVF

SEQ ID NO: 275565 - protein, 15 aa, Artificial Sequence
  Description of Artificial Sequence: Synthetic peptide
  Seed: SIGKVCRTLLAKSVF
SIYKVKRRLLTKSVF

SEQ ID NO: 275566 - protein, 15 aa, Artificial Sequence
  Description of Artificial Sequence: Synthetic peptide
  Seed: SIGKVCRTLLAKSVF
SIYKVKRRLLVKSVF

SEQ ID NO: 275567 - protein, 15 aa, Artificial Sequence
  Description of Artificial Sequence: Synthetic peptide
  Seed: SIGKVCRTLLAKSVF
SIYKVKRRLLWKSVF

SEQ ID NO: 275568 - protein, 15 aa, Artificial Sequence
  Description of Artificial Sequence: Synthetic peptide
  Seed: SIGKVCRTLLAKSVF
SIYKVKRRLLYKSVF

SEQ ID NO: 275569 - protein, 15 aa, Artificial Sequence
  Description of Artificial Sequence: Synthetic peptide
  Seed: SIGKVCRTLLAKSVF
SIYKVKRSLLAKSVF

SEQ ID NO: 275570 - protein, 15 aa, Artificial Sequence
  Description of Artificial Sequence: Synthetic peptide
  Seed: SIGKVCRTLLAKSVF
SIYKVKRSLLGKSVF

SEQ ID NO: 275571 - protein, 15 aa, Artificial Sequence
  Description of Artificial Sequence: Synthetic peptide
  Seed: SIGKVCRTLLAKSVF
SIYKVKRSLLHKSVF

SEQ ID NO: 275572 - protein, 15 aa, Artificial Sequence
  Description of Artificial Sequence: Synthetic peptide
  Seed: SIGKVCRTLLAKSVF
SIYKVKRSLLKKSVF

SEQ ID NO: 275573 - protein, 15 aa, Artificial Sequence
  Description of Artificial Sequence: Synthetic peptide
  Seed: SIGKVCRTLLAKSVF
SIYKVKRSLLNKSVF

SEQ ID NO: 275574 - protein, 15 aa, Artificial Sequence
  Description of Artificial Sequence: Synthetic peptide
  Seed: SIGKVCRTLLAKSVF
SIYKVKRSLLQKSVF

SEQ ID NO: 275575 - protein, 15 aa, Artificial Sequence
  Description of Artificial Sequence: Synthetic peptide
  Seed: SIGKVCRTLLAKSVF
SIYKVKRSLLRKSVF

SEQ ID NO: 275576 - protein, 15 aa, Artificial Sequence
  Description of Artificial Sequence: Synthetic peptide
  Seed: SIGKVCRTLLAKSVF
SIYKVKRSLLSKSVF

SEQ ID NO: 275577 - protein, 15 aa, Artificial Sequence
  Description of Artificial Sequence: Synthetic peptide
  Seed: SIGKVCRTLLAKSVF
SIYKVKRSLLTKSVF

SEQ ID NO: 275578 - protein, 15 aa, Artificial Sequence
  Description of Artificial Sequence: Synthetic peptide
  Seed: SIGKVCRTLLAKSVF
SIYKVKRSLLVKSVF

SEQ ID NO: 275579 - protein, 15 aa, Artificial Sequence
  Description of Artificial Sequence: Synthetic peptide
  Seed: SIGKVCRTLLAKSVF
SIYKVKRSLLYKSVF

SEQ ID NO: 275580 - protein, 15 aa, Artificial Sequence
  Description of Artificial Sequence: Synthetic peptide
  Seed: SIGKVCRTLLAKSVF
SIYKVKRTLLAKSVF

SEQ ID NO: 275581 - protein, 15 aa, Artificial Sequence
  Description of Artificial Sequence: Synthetic peptide
  Seed: SIGKVCRTLLAKSVF
SIYKVKRTLLGKSVF

SEQ ID NO: 275582 - protein, 15 aa, Artificial Sequence
  Description of Artificial Sequence: Synthetic peptide
  Seed: SIGKVCRTLLAKSVF
SIYKVKRTLLHKSVF

SEQ ID NO: 275583 - protein, 15 aa, Artificial Sequence
  Description of Artificial Sequence: Synthetic peptide
  Seed: SIGKVCRTLLAKSVF
SIYKVKRTLLIKSVF

SEQ ID NO: 275584 - protein, 15 aa, Artificial Sequence
  Description of Artificial Sequence: Synthetic peptide
  Seed: SIGKVCRTLLAKSVF
SIYKVKRTLLKKSVF

SEQ ID NO: 275585 - protein, 15 aa, Artificial Sequence
  Description of Artificial Sequence: Synthetic peptide
  Seed: SIGKVCRTLLAKSVF
SIYKVKRTLLLKSVF

SEQ ID NO: 275586 - protein, 15 aa, Artificial Sequence
  Description of Artificial Sequence: Synthetic peptide
  Seed: SIGKVCRTLLAKSVF
SIYKVKRTLLMKSVF

SEQ ID NO: 275587 - protein, 15 aa, Artificial Sequence
  Description of Artificial Sequence: Synthetic peptide
  Seed: SIGKVCRTLLAKSVF
SIYKVKRTLLNKSVF

SEQ ID NO: 275588 - protein, 15 aa, Artificial Sequence
  Description of Artificial Sequence: Synthetic peptide
  Seed: SIGKVCRTLLAKSVF
SIYKVKRTLLQKSVF

SEQ ID NO: 275589 - protein, 15 aa, Artificial Sequence
  Description of Artificial Sequence: Synthetic peptide
  Seed: SIGKVCRTLLAKSVF
SIYKVKRTLLRKSVF

SEQ ID NO: 275590 - protein, 15 aa, Artificial Sequence
  Description of Artificial Sequence: Synthetic peptide
  Seed: SIGKVCRTLLAKSVF
SIYKVKRTLLSKSVF

SEQ ID NO: 275591 - protein, 15 aa, Artificial Sequence
  Description of Artificial Sequence: Synthetic peptide
  Seed: SIGKVCRTLLAKSVF
SIYKVKRTLLTKSVF

SEQ ID NO: 275592 - protein, 15 aa, Artificial Sequence
  Description of Artificial Sequence: Synthetic peptide
  Seed: SIGKVCRTLLAKSVF
SIYKVKRTLLVKSVF

SEQ ID NO: 275593 - protein, 15 aa, Artificial Sequence
  Description of Artificial Sequence: Synthetic peptide
  Seed: SIGKVCRTLLAKSVF
SIYKVKRTLLYKSVF

SEQ ID NO: 275594 - protein, 15 aa, Artificial Sequence
  Description of Artificial Sequence: Synthetic peptide
  Seed: SIGKVCRTLLAKSVF
SIYKVKRVLLAKSVF

SEQ ID NO: 275595 - protein, 15 aa, Artificial Sequence
  Description of Artificial Sequence: Synthetic peptide
  Seed: SIGKVCRTLLAKSVF
SIYKVKRVLLGKSVF

SEQ ID NO: 275596 - protein, 15 aa, Artificial Sequence
  Description of Artificial Sequence: Synthetic peptide
  Seed: SIGKVCRTLLAKSVF
SIYKVKRVLLHKSVF

SEQ ID NO: 275597 - protein, 15 aa, Artificial Sequence
  Description of Artificial Sequence: Synthetic peptide
  Seed: SIGKVCRTLLAKSVF
SIYKVKRVLLKKSVF

SEQ ID NO: 275598 - protein, 15 aa, Artificial Sequence
  Description of Artificial Sequence: Synthetic peptide
  Seed: SIGKVCRTLLAKSVF
SIYKVKRVLLQKSVF

SEQ ID NO: 275599 - protein, 15 aa, Artificial Sequence
  Description of Artificial Sequence: Synthetic peptide
  Seed: SIGKVCRTLLAKSVF
SIYKVKRVLLRKSVF

SEQ ID NO: 275600 - protein, 15 aa, Artificial Sequence
  Description of Artificial Sequence: Synthetic peptide
  Seed: SIGKVCRTLLAKSVF
SIYKVKRVLLSKSVF

SEQ ID NO: 275601 - protein, 15 aa, Artificial Sequence
  Description of Artificial Sequence: Synthetic peptide
  Seed: SIGKVCRTLLAKSVF
SIYKVLRALLAKSVF

SEQ ID NO: 275602 - protein, 15 aa, Artificial Sequence
  Description of Artificial Sequence: Synthetic peptide
  Seed: SIGKVCRTLLAKSVF
SIYKVLRALLDKSVF

SEQ ID NO: 275603 - protein, 15 aa, Artificial Sequence
  Description of Artificial Sequence: Synthetic peptide
  Seed: SIGKVCRTLLAKSVF
SIYKVLRALLEKSVF

SEQ ID NO: 275604 - protein, 15 aa, Artificial Sequence
  Description of Artificial Sequence: Synthetic peptide
  Seed: SIGKVCRTLLAKSVF
SIYKVLRALLGKSVF

SEQ ID NO: 275605 - protein, 15 aa, Artificial Sequence
  Description of Artificial Sequence: Synthetic peptide
  Seed: SIGKVCRTLLAKSVF
SIYKVLRALLHKSVF

SEQ ID NO: 275606 - protein, 15 aa, Artificial Sequence
  Description of Artificial Sequence: Synthetic peptide
  Seed: SIGKVCRTLLAKSVF
SIYKVLRALLKKSVF

SEQ ID NO: 275607 - protein, 15 aa, Artificial Sequence
  Description of Artificial Sequence: Synthetic peptide
  Seed: SIGKVCRTLLAKSVF
SIYKVLRALLNKSVF

SEQ ID NO: 275608 - protein, 15 aa, Artificial Sequence
  Description of Artificial Sequence: Synthetic peptide
  Seed: SIGKVCRTLLAKSVF
SIYKVLRALLPKSVF

SEQ ID NO: 275609 - protein, 15 aa, Artificial Sequence
  Description of Artificial Sequence: Synthetic peptide
  Seed: SIGKVCRTLLAKSVF
SIYKVLRALLQKSVF

SEQ ID NO: 275610 - protein, 15 aa, Artificial Sequence
  Description of Artificial Sequence: Synthetic peptide
  Seed: SIGKVCRTLLAKSVF
SIYKVLRALLRKSVF

SEQ ID NO: 275611 - protein, 15 aa, Artificial Sequence
  Description of Artificial Sequence: Synthetic peptide
  Seed: SIGKVCRTLLAKSVF
SIYKVLRALLSKSVF

SEQ ID NO: 275612 - protein, 15 aa, Artificial Sequence
  Description of Artificial Sequence: Synthetic peptide
  Seed: SIGKVCRTLLAKSVF
SIYKVLRALLTKSVF

SEQ ID NO: 275613 - protein, 15 aa, Artificial Sequence
  Description of Artificial Sequence: Synthetic peptide
  Seed: SIGKVCRTLLAKSVF
SIYKVLRDLLAKSVF

SEQ ID NO: 275614 - protein, 15 aa, Artificial Sequence
  Description of Artificial Sequence: Synthetic peptide
  Seed: SIGKVCRTLLAKSVF
SIYKVLRDLLDKSVF

SEQ ID NO: 275615 - protein, 15 aa, Artificial Sequence
  Description of Artificial Sequence: Synthetic peptide
  Seed: SIGKVCRTLLAKSVF
SIYKVLRDLLEKSVF

SEQ ID NO: 275616 - protein, 15 aa, Artificial Sequence
  Description of Artificial Sequence: Synthetic peptide
  Seed: SIGKVCRTLLAKSVF
SIYKVLRDLLSKSVF

SEQ ID NO: 275617 - protein, 15 aa, Artificial Sequence
  Description of Artificial Sequence: Synthetic peptide
  Seed: SIGKVCRTLLAKSVF
SIYKVLRGLLAKSVF

SEQ ID NO: 275618 - protein, 15 aa, Artificial Sequence
  Description of Artificial Sequence: Synthetic peptide
  Seed: SIGKVCRTLLAKSVF
SIYKVLRGLLDKSVF

SEQ ID NO: 275619 - protein, 15 aa, Artificial Sequence
  Description of Artificial Sequence: Synthetic peptide
  Seed: SIGKVCRTLLAKSVF
SIYKVLRGLLGKSVF

SEQ ID NO: 275620 - protein, 15 aa, Artificial Sequence
  Description of Artificial Sequence: Synthetic peptide
  Seed: SIGKVCRTLLAKSVF
SIYKVLRGLLHKSVF

SEQ ID NO: 275621 - protein, 15 aa, Artificial Sequence
  Description of Artificial Sequence: Synthetic peptide
  Seed: SIGKVCRTLLAKSVF
SIYKVLRGLLKKSVF

SEQ ID NO: 275622 - protein, 15 aa, Artificial Sequence
  Description of Artificial Sequence: Synthetic peptide
  Seed: SIGKVCRTLLAKSVF
SIYKVLRGLLNKSVF

SEQ ID NO: 275623 - protein, 15 aa, Artificial Sequence
  Description of Artificial Sequence: Synthetic peptide
  Seed: SIGKVCRTLLAKSVF
SIYKVLRGLLQKSVF

SEQ ID NO: 275624 - protein, 15 aa, Artificial Sequence
  Description of Artificial Sequence: Synthetic peptide
  Seed: SIGKVCRTLLAKSVF
SIYKVLRGLLRKSVF

SEQ ID NO: 275625 - protein, 15 aa, Artificial Sequence
  Description of Artificial Sequence: Synthetic peptide
  Seed: SIGKVCRTLLAKSVF
SIYKVLRGLLSKSVF

SEQ ID NO: 275626 - protein, 15 aa, Artificial Sequence
  Description of Artificial Sequence: Synthetic peptide
  Seed: SIGKVCRTLLAKSVF
SIYKVLRGLLTKSVF

SEQ ID NO: 275627 - protein, 15 aa, Artificial Sequence
  Description of Artificial Sequence: Synthetic peptide
  Seed: SIGKVCRTLLAKSVF
SIYKVLRGLLVKSVF

SEQ ID NO: 275628 - protein, 15 aa, Artificial Sequence
  Description of Artificial Sequence: Synthetic peptide
  Seed: SIGKVCRTLLAKSVF
SIYKVLRHLLAKSVF

SEQ ID NO: 275629 - protein, 15 aa, Artificial Sequence
  Description of Artificial Sequence: Synthetic peptide
  Seed: SIGKVCRTLLAKSVF
SIYKVLRHLLGKSVF

SEQ ID NO: 275630 - protein, 15 aa, Artificial Sequence
  Description of Artificial Sequence: Synthetic peptide
  Seed: SIGKVCRTLLAKSVF
SIYKVLRHLLHKSVF

SEQ ID NO: 275631 - protein, 15 aa, Artificial Sequence
  Description of Artificial Sequence: Synthetic peptide
  Seed: SIGKVCRTLLAKSVF
SIYKVLRHLLIKSVF

SEQ ID NO: 275632 - protein, 15 aa, Artificial Sequence
  Description of Artificial Sequence: Synthetic peptide
  Seed: SIGKVCRTLLAKSVF
SIYKVLRHLLKKSVF

SEQ ID NO: 275633 - protein, 15 aa, Artificial Sequence
  Description of Artificial Sequence: Synthetic peptide
  Seed: SIGKVCRTLLAKSVF
SIYKVLRHLLLKSVF

SEQ ID NO: 275634 - protein, 15 aa, Artificial Sequence
  Description of Artificial Sequence: Synthetic peptide
  Seed: SIGKVCRTLLAKSVF
SIYKVLRHLLMKSVF

SEQ ID NO: 275635 - protein, 15 aa, Artificial Sequence
  Description of Artificial Sequence: Synthetic peptide
  Seed: SIGKVCRTLLAKSVF
SIYKVLRHLLNKSVF

SEQ ID NO: 275636 - protein, 15 aa, Artificial Sequence
  Description of Artificial Sequence: Synthetic peptide
  Seed: SIGKVCRTLLAKSVF
SIYKVLRHLLPKSVF

SEQ ID NO: 275637 - protein, 15 aa, Artificial Sequence
  Description of Artificial Sequence: Synthetic peptide
  Seed: SIGKVCRTLLAKSVF
SIYKVLRHLLQKSVF

SEQ ID NO: 275638 - protein, 15 aa, Artificial Sequence
  Description of Artificial Sequence: Synthetic peptide
  Seed: SIGKVCRTLLAKSVF
SIYKVLRHLLRKSVF

SEQ ID NO: 275639 - protein, 15 aa, Artificial Sequence
  Description of Artificial Sequence: Synthetic peptide
  Seed: SIGKVCRTLLAKSVF
SIYKVLRHLLSKSVF

SEQ ID NO: 275640 - protein, 15 aa, Artificial Sequence
  Description of Artificial Sequence: Synthetic peptide
  Seed: SIGKVCRTLLAKSVF
SIYKVLRHLLTKSVF

SEQ ID NO: 275641 - protein, 15 aa, Artificial Sequence
  Description of Artificial Sequence: Synthetic peptide
  Seed: SIGKVCRTLLAKSVF
SIYKVLRHLLVKSVF

SEQ ID NO: 275642 - protein, 15 aa, Artificial Sequence
  Description of Artificial Sequence: Synthetic peptide
  Seed: SIGKVCRTLLAKSVF
SIYKVLRHLLYKSVF

SEQ ID NO: 275643 - protein, 15 aa, Artificial Sequence
  Description of Artificial Sequence: Synthetic peptide
  Seed: SIGKVCRTLLAKSVF
SIYKVLRILLDKSVF

SEQ ID NO: 275644 - protein, 15 aa, Artificial Sequence
  Description of Artificial Sequence: Synthetic peptide
  Seed: SIGKVCRTLLAKSVF
SIYKVLRILLHKSVF

SEQ ID NO: 275645 - protein, 15 aa, Artificial Sequence
  Description of Artificial Sequence: Synthetic peptide
  Seed: SIGKVCRTLLAKSVF
SIYKVLRILLSKSVF

SEQ ID NO: 275646 - protein, 15 aa, Artificial Sequence
  Description of Artificial Sequence: Synthetic peptide
  Seed: SIGKVCRTLLAKSVF
SIYKVLRKLLAKSVF

SEQ ID NO: 275647 - protein, 15 aa, Artificial Sequence
  Description of Artificial Sequence: Synthetic peptide
  Seed: SIGKVCRTLLAKSVF
SIYKVLRKLLCKSVF

SEQ ID NO: 275648 - protein, 15 aa, Artificial Sequence
  Description of Artificial Sequence: Synthetic peptide
  Seed: SIGKVCRTLLAKSVF
SIYKVLRKLLDKSVF

SEQ ID NO: 275649 - protein, 15 aa, Artificial Sequence
  Description of Artificial Sequence: Synthetic peptide
  Seed: SIGKVCRTLLAKSVF
SIYKVLRKLLEKSVF

SEQ ID NO: 275650 - protein, 15 aa, Artificial Sequence
  Description of Artificial Sequence: Synthetic peptide
  Seed: SIGKVCRTLLAKSVF
SIYKVLRKLLFKSVF

SEQ ID NO: 275651 - protein, 15 aa, Artificial Sequence
  Description of Artificial Sequence: Synthetic peptide
  Seed: SIGKVCRTLLAKSVF
SIYKVLRKLLGKSVF

SEQ ID NO: 275652 - protein, 15 aa, Artificial Sequence
  Description of Artificial Sequence: Synthetic peptide
  Seed: SIGKVCRTLLAKSVF
SIYKVLRKLLHKSVF

SEQ ID NO: 275653 - protein, 15 aa, Artificial Sequence
  Description of Artificial Sequence: Synthetic peptide
  Seed: SIGKVCRTLLAKSVF
SIYKVLRKLLIKSVF

SEQ ID NO: 275654 - protein, 15 aa, Artificial Sequence
  Description of Artificial Sequence: Synthetic peptide
  Seed: SIGKVCRTLLAKSVF
SIYKVLRKLLKKSVF

SEQ ID NO: 275655 - protein, 15 aa, Artificial Sequence
  Description of Artificial Sequence: Synthetic peptide
  Seed: SIGKVCRTLLAKSVF
SIYKVLRKLLLKSVF

SEQ ID NO: 275656 - protein, 15 aa, Artificial Sequence
  Description of Artificial Sequence: Synthetic peptide
  Seed: SIGKVCRTLLAKSVF
SIYKVLRKLLMKSVF

SEQ ID NO: 275657 - protein, 15 aa, Artificial Sequence
  Description of Artificial Sequence: Synthetic peptide
  Seed: SIGKVCRTLLAKSVF
SIYKVLRKLLNKSVF

SEQ ID NO: 275658 - protein, 15 aa, Artificial Sequence
  Description of Artificial Sequence: Synthetic peptide
  Seed: SIGKVCRTLLAKSVF
SIYKVLRKLLPKSVF

SEQ ID NO: 275659 - protein, 15 aa, Artificial Sequence
  Description of Artificial Sequence: Synthetic peptide
  Seed: SIGKVCRTLLAKSVF
SIYKVLRKLLQKSVF

SEQ ID NO: 275660 - protein, 15 aa, Artificial Sequence
  Description of Artificial Sequence: Synthetic peptide
  Seed: SIGKVCRTLLAKSVF
SIYKVLRKLLRKSVF

SEQ ID NO: 275661 - protein, 15 aa, Artificial Sequence
  Description of Artificial Sequence: Synthetic peptide
  Seed: SIGKVCRTLLAKSVF
SIYKVLRKLLSKSVF

SEQ ID NO: 275662 - protein, 15 aa, Artificial Sequence
  Description of Artificial Sequence: Synthetic peptide
  Seed: SIGKVCRTLLAKSVF
SIYKVLRKLLTKSVF

SEQ ID NO: 275663 - protein, 15 aa, Artificial Sequence
  Description of Artificial Sequence: Synthetic peptide
  Seed: SIGKVCRTLLAKSVF
SIYKVLRKLLVKSVF

SEQ ID NO: 275664 - protein, 15 aa, Artificial Sequence
  Description of Artificial Sequence: Synthetic peptide
  Seed: SIGKVCRTLLAKSVF
SIYKVLRKLLWKSVF

SEQ ID NO: 275665 - protein, 15 aa, Artificial Sequence
  Description of Artificial Sequence: Synthetic peptide
  Seed: SIGKVCRTLLAKSVF
SIYKVLRKLLYKSVF

SEQ ID NO: 275666 - protein, 15 aa, Artificial Sequence
  Description of Artificial Sequence: Synthetic peptide
  Seed: SIGKVCRTLLAKSVF
SIYKVLRMLLHKSVF

SEQ ID NO: 275667 - protein, 15 aa, Artificial Sequence
  Description of Artificial Sequence: Synthetic peptide
  Seed: SIGKVCRTLLAKSVF
SIYKVLRNLLAKSVF

SEQ ID NO: 275668 - protein, 15 aa, Artificial Sequence
  Description of Artificial Sequence: Synthetic peptide
  Seed: SIGKVCRTLLAKSVF
SIYKVLRNLLDKSVF

SEQ ID NO: 275669 - protein, 15 aa, Artificial Sequence
  Description of Artificial Sequence: Synthetic peptide
  Seed: SIGKVCRTLLAKSVF
SIYKVLRNLLEKSVF

SEQ ID NO: 275670 - protein, 15 aa, Artificial Sequence
  Description of Artificial Sequence: Synthetic peptide
  Seed: SIGKVCRTLLAKSVF
SIYKVLRNLLGKSVF

SEQ ID NO: 275671 - protein, 15 aa, Artificial Sequence
  Description of Artificial Sequence: Synthetic peptide
  Seed: SIGKVCRTLLAKSVF
SIYKVLRNLLHKSVF

SEQ ID NO: 275672 - protein, 15 aa, Artificial Sequence
  Description of Artificial Sequence: Synthetic peptide
  Seed: SIGKVCRTLLAKSVF
SIYKVLRNLLIKSVF

SEQ ID NO: 275673 - protein, 15 aa, Artificial Sequence
  Description of Artificial Sequence: Synthetic peptide
  Seed: SIGKVCRTLLAKSVF
SIYKVLRNLLKKSVF

SEQ ID NO: 275674 - protein, 15 aa, Artificial Sequence
  Description of Artificial Sequence: Synthetic peptide
  Seed: SIGKVCRTLLAKSVF
SIYKVLRNLLMKSVF

SEQ ID NO: 275675 - protein, 15 aa, Artificial Sequence
  Description of Artificial Sequence: Synthetic peptide
  Seed: SIGKVCRTLLAKSVF
SIYKVLRNLLNKSVF

SEQ ID NO: 275676 - protein, 15 aa, Artificial Sequence
  Description of Artificial Sequence: Synthetic peptide
  Seed: SIGKVCRTLLAKSVF
SIYKVLRNLLPKSVF

SEQ ID NO: 275677 - protein, 15 aa, Artificial Sequence
  Description of Artificial Sequence: Synthetic peptide
  Seed: SIGKVCRTLLAKSVF
SIYKVLRNLLQKSVF

SEQ ID NO: 275678 - protein, 15 aa, Artificial Sequence
  Description of Artificial Sequence: Synthetic peptide
  Seed: SIGKVCRTLLAKSVF
SIYKVLRNLLRKSVF

SEQ ID NO: 275679 - protein, 15 aa, Artificial Sequence
  Description of Artificial Sequence: Synthetic peptide
  Seed: SIGKVCRTLLAKSVF
SIYKVLRNLLTKSVF

SEQ ID NO: 275680 - protein, 15 aa, Artificial Sequence
  Description of Artificial Sequence: Synthetic peptide
  Seed: SIGKVCRTLLAKSVF
SIYKVLRNLLVKSVF

SEQ ID NO: 275681 - protein, 15 aa, Artificial Sequence
  Description of Artificial Sequence: Synthetic peptide
  Seed: SIGKVCRTLLAKSVF
SIYKVLRPLLAKSVF

SEQ ID NO: 275682 - protein, 15 aa, Artificial Sequence
  Description of Artificial Sequence: Synthetic peptide
  Seed: SIGKVCRTLLAKSVF
SIYKVLRPLLDKSVF

SEQ ID NO: 275683 - protein, 15 aa, Artificial Sequence
  Description of Artificial Sequence: Synthetic peptide
  Seed: SIGKVCRTLLAKSVF
SIYKVLRPLLEKSVF

SEQ ID NO: 275684 - protein, 15 aa, Artificial Sequence
  Description of Artificial Sequence: Synthetic peptide
  Seed: SIGKVCRTLLAKSVF
SIYKVLRPLLGKSVF

SEQ ID NO: 275685 - protein, 15 aa, Artificial Sequence
  Description of Artificial Sequence: Synthetic peptide
  Seed: SIGKVCRTLLAKSVF
SIYKVLRPLLHKSVF

SEQ ID NO: 275686 - protein, 15 aa, Artificial Sequence
  Description of Artificial Sequence: Synthetic peptide
  Seed: SIGKVCRTLLAKSVF
SIYKVLRPLLIKSVF

SEQ ID NO: 275687 - protein, 15 aa, Artificial Sequence
  Description of Artificial Sequence: Synthetic peptide
  Seed: SIGKVCRTLLAKSVF
SIYKVLRPLLKKSVF

SEQ ID NO: 275688 - protein, 15 aa, Artificial Sequence
  Description of Artificial Sequence: Synthetic peptide
  Seed: SIGKVCRTLLAKSVF
SIYKVLRPLLLKSVF

SEQ ID NO: 275689 - protein, 15 aa, Artificial Sequence
  Description of Artificial Sequence: Synthetic peptide
  Seed: SIGKVCRTLLAKSVF
SIYKVLRPLLMKSVF

SEQ ID NO: 275690 - protein, 15 aa, Artificial Sequence
  Description of Artificial Sequence: Synthetic peptide
  Seed: SIGKVCRTLLAKSVF
SIYKVLRPLLNKSVF

SEQ ID NO: 275691 - protein, 15 aa, Artificial Sequence
  Description of Artificial Sequence: Synthetic peptide
  Seed: SIGKVCRTLLAKSVF
SIYKVLRPLLPKSVF

SEQ ID NO: 275692 - protein, 15 aa, Artificial Sequence
  Description of Artificial Sequence: Synthetic peptide
  Seed: SIGKVCRTLLAKSVF
SIYKVLRPLLQKSVF

SEQ ID NO: 275693 - protein, 15 aa, Artificial Sequence
  Description of Artificial Sequence: Synthetic peptide
  Seed: SIGKVCRTLLAKSVF
SIYKVLRPLLRKSVF

SEQ ID NO: 275694 - protein, 15 aa, Artificial Sequence
  Description of Artificial Sequence: Synthetic peptide
  Seed: SIGKVCRTLLAKSVF
SIYKVLRPLLSKSVF

SEQ ID NO: 275695 - protein, 15 aa, Artificial Sequence
  Description of Artificial Sequence: Synthetic peptide
  Seed: SIGKVCRTLLAKSVF
SIYKVLRPLLTKSVF

SEQ ID NO: 275696 - protein, 15 aa, Artificial Sequence
  Description of Artificial Sequence: Synthetic peptide
  Seed: SIGKVCRTLLAKSVF
SIYKVLRPLLVKSVF

SEQ ID NO: 275697 - protein, 15 aa, Artificial Sequence
  Description of Artificial Sequence: Synthetic peptide
  Seed: SIGKVCRTLLAKSVF
SIYKVLRPLLYKSVF

SEQ ID NO: 275698 - protein, 15 aa, Artificial Sequence
  Description of Artificial Sequence: Synthetic peptide
  Seed: SIGKVCRTLLAKSVF
SIYKVLRQLLAKSVF

SEQ ID NO: 275699 - protein, 15 aa, Artificial Sequence
  Description of Artificial Sequence: Synthetic peptide
  Seed: SIGKVCRTLLAKSVF
SIYKVLRQLLGKSVF

SEQ ID NO: 275700 - protein, 15 aa, Artificial Sequence
  Description of Artificial Sequence: Synthetic peptide
  Seed: SIGKVCRTLLAKSVF
SIYKVLRQLLHKSVF

SEQ ID NO: 275701 - protein, 15 aa, Artificial Sequence
  Description of Artificial Sequence: Synthetic peptide
  Seed: SIGKVCRTLLAKSVF
SIYKVLRQLLKKSVF

SEQ ID NO: 275702 - protein, 15 aa, Artificial Sequence
  Description of Artificial Sequence: Synthetic peptide
  Seed: SIGKVCRTLLAKSVF
SIYKVLRQLLNKSVF

SEQ ID NO: 275703 - protein, 15 aa, Artificial Sequence
  Description of Artificial Sequence: Synthetic peptide
  Seed: SIGKVCRTLLAKSVF
SIYKVLRQLLQKSVF

SEQ ID NO: 275704 - protein, 15 aa, Artificial Sequence
  Description of Artificial Sequence: Synthetic peptide
  Seed: SIGKVCRTLLAKSVF
SIYKVLRQLLRKSVF

SEQ ID NO: 275705 - protein, 15 aa, Artificial Sequence
  Description of Artificial Sequence: Synthetic peptide
  Seed: SIGKVCRTLLAKSVF
SIYKVLRQLLSKSVF

SEQ ID NO: 275706 - protein, 15 aa, Artificial Sequence
  Description of Artificial Sequence: Synthetic peptide
  Seed: SIGKVCRTLLAKSVF
SIYKVLRQLLTKSVF

SEQ ID NO: 275707 - protein, 15 aa, Artificial Sequence
  Description of Artificial Sequence: Synthetic peptide
  Seed: SIGKVCRTLLAKSVF
SIYKVLRRLLAKSVF

SEQ ID NO: 275708 - protein, 15 aa, Artificial Sequence
  Description of Artificial Sequence: Synthetic peptide
  Seed: SIGKVCRTLLAKSVF
SIYKVLRRLLCKSVF

SEQ ID NO: 275709 - protein, 15 aa, Artificial Sequence
  Description of Artificial Sequence: Synthetic peptide
  Seed: SIGKVCRTLLAKSVF
SIYKVLRRLLDKSVF

SEQ ID NO: 275710 - protein, 15 aa, Artificial Sequence
  Description of Artificial Sequence: Synthetic peptide
  Seed: SIGKVCRTLLAKSVF
SIYKVLRRLLEKSVF

SEQ ID NO: 275711 - protein, 15 aa, Artificial Sequence
  Description of Artificial Sequence: Synthetic peptide
  Seed: SIGKVCRTLLAKSVF
SIYKVLRRLLFKSVF

SEQ ID NO: 275712 - protein, 15 aa, Artificial Sequence
  Description of Artificial Sequence: Synthetic peptide
  Seed: SIGKVCRTLLAKSVF
SIYKVLRRLLGKSVF

SEQ ID NO: 275713 - protein, 15 aa, Artificial Sequence
  Description of Artificial Sequence: Synthetic peptide
  Seed: SIGKVCRTLLAKSVF
SIYKVLRRLLHKSVF

SEQ ID NO: 275714 - protein, 15 aa, Artificial Sequence
  Description of Artificial Sequence: Synthetic peptide
  Seed: SIGKVCRTLLAKSVF
SIYKVLRRLLIKSVF

SEQ ID NO: 275715 - protein, 15 aa, Artificial Sequence
  Description of Artificial Sequence: Synthetic peptide
  Seed: SIGKVCRTLLAKSVF
SIYKVLRRLLKKSVF

SEQ ID NO: 275716 - protein, 15 aa, Artificial Sequence
  Description of Artificial Sequence: Synthetic peptide
  Seed: SIGKVCRTLLAKSVF
SIYKVLRRLLLKSVF

SEQ ID NO: 275717 - protein, 15 aa, Artificial Sequence
  Description of Artificial Sequence: Synthetic peptide
  Seed: SIGKVCRTLLAKSVF
SIYKVLRRLLMKSVF

SEQ ID NO: 275718 - protein, 15 aa, Artificial Sequence
  Description of Artificial Sequence: Synthetic peptide
  Seed: SIGKVCRTLLAKSVF
SIYKVLRRLLNKSVF

SEQ ID NO: 275719 - protein, 15 aa, Artificial Sequence
  Description of Artificial Sequence: Synthetic peptide
  Seed: SIGKVCRTLLAKSVF
SIYKVLRRLLPKSVF

SEQ ID NO: 275720 - protein, 15 aa, Artificial Sequence
  Description of Artificial Sequence: Synthetic peptide
  Seed: SIGKVCRTLLAKSVF
SIYKVLRRLLQKSVF

SEQ ID NO: 275721 - protein, 15 aa, Artificial Sequence
  Description of Artificial Sequence: Synthetic peptide
  Seed: SIGKVCRTLLAKSVF
SIYKVLRRLLRKSVF

SEQ ID NO: 275722 - protein, 15 aa, Artificial Sequence
  Description of Artificial Sequence: Synthetic peptide
  Seed: SIGKVCRTLLAKSVF
SIYKVLRRLLSKSVF

SEQ ID NO: 275723 - protein, 15 aa, Artificial Sequence
  Description of Artificial Sequence: Synthetic peptide
  Seed: SIGKVCRTLLAKSVF
SIYKVLRRLLTKSVF

SEQ ID NO: 275724 - protein, 15 aa, Artificial Sequence
  Description of Artificial Sequence: Synthetic peptide
  Seed: SIGKVCRTLLAKSVF
SIYKVLRRLLVKSVF

SEQ ID NO: 275725 - protein, 15 aa, Artificial Sequence
  Description of Artificial Sequence: Synthetic peptide
  Seed: SIGKVCRTLLAKSVF
SIYKVLRRLLWKSVF

SEQ ID NO: 275726 - protein, 15 aa, Artificial Sequence
  Description of Artificial Sequence: Synthetic peptide
  Seed: SIGKVCRTLLAKSVF
SIYKVLRRLLYKSVF

SEQ ID NO: 275727 - protein, 15 aa, Artificial Sequence
  Description of Artificial Sequence: Synthetic peptide
  Seed: SIGKVCRTLLAKSVF
SIYKVLRSLLAKSVF

SEQ ID NO: 275728 - protein, 15 aa, Artificial Sequence
  Description of Artificial Sequence: Synthetic peptide
  Seed: SIGKVCRTLLAKSVF
SIYKVLRSLLDKSVF

SEQ ID NO: 275729 - protein, 15 aa, Artificial Sequence
  Description of Artificial Sequence: Synthetic peptide
  Seed: SIGKVCRTLLAKSVF
SIYKVLRSLLEKSVF

SEQ ID NO: 275730 - protein, 15 aa, Artificial Sequence
  Description of Artificial Sequence: Synthetic peptide
  Seed: SIGKVCRTLLAKSVF
SIYKVLRSLLGKSVF

SEQ ID NO: 275731 - protein, 15 aa, Artificial Sequence
  Description of Artificial Sequence: Synthetic peptide
  Seed: SIGKVCRTLLAKSVF
SIYKVLRSLLHKSVF

SEQ ID NO: 275732 - protein, 15 aa, Artificial Sequence
  Description of Artificial Sequence: Synthetic peptide
  Seed: SIGKVCRTLLAKSVF
SIYKVLRSLLKKSVF

SEQ ID NO: 275733 - protein, 15 aa, Artificial Sequence
  Description of Artificial Sequence: Synthetic peptide
  Seed: SIGKVCRTLLAKSVF
SIYKVLRSLLMKSVF

SEQ ID NO: 275734 - protein, 15 aa, Artificial Sequence
  Description of Artificial Sequence: Synthetic peptide
  Seed: SIGKVCRTLLAKSVF
SIYKVLRSLLNKSVF

SEQ ID NO: 275735 - protein, 15 aa, Artificial Sequence
  Description of Artificial Sequence: Synthetic peptide
  Seed: SIGKVCRTLLAKSVF
SIYKVLRSLLPKSVF

SEQ ID NO: 275736 - protein, 15 aa, Artificial Sequence
  Description of Artificial Sequence: Synthetic peptide
  Seed: SIGKVCRTLLAKSVF
SIYKVLRSLLQKSVF

SEQ ID NO: 275737 - protein, 15 aa, Artificial Sequence
  Description of Artificial Sequence: Synthetic peptide
  Seed: SIGKVCRTLLAKSVF
SIYKVLRSLLRKSVF

SEQ ID NO: 275738 - protein, 15 aa, Artificial Sequence
  Description of Artificial Sequence: Synthetic peptide
  Seed: SIGKVCRTLLAKSVF
SIYKVLRSLLSKSVF

SEQ ID NO: 275739 - protein, 15 aa, Artificial Sequence
  Description of Artificial Sequence: Synthetic peptide
  Seed: SIGKVCRTLLAKSVF
SIYKVLRSLLTKSVF

SEQ ID NO: 275740 - protein, 15 aa, Artificial Sequence
  Description of Artificial Sequence: Synthetic peptide
  Seed: SIGKVCRTLLAKSVF
SIYKVLRSLLVKSVF

SEQ ID NO: 275741 - protein, 15 aa, Artificial Sequence
  Description of Artificial Sequence: Synthetic peptide
  Seed: SIGKVCRTLLAKSVF
SIYKVLRSLLYKSVF

SEQ ID NO: 275742 - protein, 15 aa, Artificial Sequence
  Description of Artificial Sequence: Synthetic peptide
  Seed: SIGKVCRTLLAKSVF
SIYKVLRTLLAKSVF

SEQ ID NO: 275743 - protein, 15 aa, Artificial Sequence
  Description of Artificial Sequence: Synthetic peptide
  Seed: SIGKVCRTLLAKSVF
SIYKVLRTLLDKSVF

SEQ ID NO: 275744 - protein, 15 aa, Artificial Sequence
  Description of Artificial Sequence: Synthetic peptide
  Seed: SIGKVCRTLLAKSVF
SIYKVLRTLLEKSVF

SEQ ID NO: 275745 - protein, 15 aa, Artificial Sequence
  Description of Artificial Sequence: Synthetic peptide
  Seed: SIGKVCRTLLAKSVF
SIYKVLRTLLGKSVF

SEQ ID NO: 275746 - protein, 15 aa, Artificial Sequence
  Description of Artificial Sequence: Synthetic peptide
  Seed: SIGKVCRTLLAKSVF
SIYKVLRTLLHKSVF

SEQ ID NO: 275747 - protein, 15 aa, Artificial Sequence
  Description of Artificial Sequence: Synthetic peptide
  Seed: SIGKVCRTLLAKSVF
SIYKVLRTLLIKSVF

SEQ ID NO: 275748 - protein, 15 aa, Artificial Sequence
  Description of Artificial Sequence: Synthetic peptide
  Seed: SIGKVCRTLLAKSVF
SIYKVLRTLLKKSVF

SEQ ID NO: 275749 - protein, 15 aa, Artificial Sequence
  Description of Artificial Sequence: Synthetic peptide
  Seed: SIGKVCRTLLAKSVF
SIYKVLRTLLMKSVF

SEQ ID NO: 275750 - protein, 15 aa, Artificial Sequence
  Description of Artificial Sequence: Synthetic peptide
  Seed: SIGKVCRTLLAKSVF
SIYKVLRTLLNKSVF

SEQ ID NO: 275751 - protein, 15 aa, Artificial Sequence
  Description of Artificial Sequence: Synthetic peptide
  Seed: SIGKVCRTLLAKSVF
SIYKVLRTLLPKSVF

SEQ ID NO: 275752 - protein, 15 aa, Artificial Sequence
  Description of Artificial Sequence: Synthetic peptide
  Seed: SIGKVCRTLLAKSVF
SIYKVLRTLLQKSVF

SEQ ID NO: 275753 - protein, 15 aa, Artificial Sequence
  Description of Artificial Sequence: Synthetic peptide
  Seed: SIGKVCRTLLAKSVF
SIYKVLRTLLRKSVF

SEQ ID NO: 275754 - protein, 15 aa, Artificial Sequence
  Description of Artificial Sequence: Synthetic peptide
  Seed: SIGKVCRTLLAKSVF
SIYKVLRTLLSKSVF

SEQ ID NO: 275755 - protein, 15 aa, Artificial Sequence
  Description of Artificial Sequence: Synthetic peptide
  Seed: SIGKVCRTLLAKSVF
SIYKVLRTLLTKSVF

SEQ ID NO: 275756 - protein, 15 aa, Artificial Sequence
  Description of Artificial Sequence: Synthetic peptide
  Seed: SIGKVCRTLLAKSVF
SIYKVLRTLLVKSVF

SEQ ID NO: 275757 - protein, 15 aa, Artificial Sequence
  Description of Artificial Sequence: Synthetic peptide
  Seed: SIGKVCRTLLAKSVF
SIYKVLRTLLYKSVF

SEQ ID NO: 275758 - protein, 15 aa, Artificial Sequence
  Description of Artificial Sequence: Synthetic peptide
  Seed: SIGKVCRTLLAKSVF
SIYKVLRVLLAKSVF

SEQ ID NO: 275759 - protein, 15 aa, Artificial Sequence
  Description of Artificial Sequence: Synthetic peptide
  Seed: SIGKVCRTLLAKSVF
SIYKVLRVLLDKSVF

SEQ ID NO: 275760 - protein, 15 aa, Artificial Sequence
  Description of Artificial Sequence: Synthetic peptide
  Seed: SIGKVCRTLLAKSVF
SIYKVLRVLLEKSVF

SEQ ID NO: 275761 - protein, 15 aa, Artificial Sequence
  Description of Artificial Sequence: Synthetic peptide
  Seed: SIGKVCRTLLAKSVF
SIYKVLRVLLHKSVF

SEQ ID NO: 275762 - protein, 15 aa, Artificial Sequence
  Description of Artificial Sequence: Synthetic peptide
  Seed: SIGKVCRTLLAKSVF
SIYKVLRVLLKKSVF

SEQ ID NO: 275763 - protein, 15 aa, Artificial Sequence
  Description of Artificial Sequence: Synthetic peptide
  Seed: SIGKVCRTLLAKSVF
SIYKVLRVLLNKSVF

SEQ ID NO: 275764 - protein, 15 aa, Artificial Sequence
  Description of Artificial Sequence: Synthetic peptide
  Seed: SIGKVCRTLLAKSVF
SIYKVLRVLLRKSVF

SEQ ID NO: 275765 - protein, 15 aa, Artificial Sequence
  Description of Artificial Sequence: Synthetic peptide
  Seed: SIGKVCRTLLAKSVF
SIYKVLRVLLSKSVF

SEQ ID NO: 275766 - protein, 15 aa, Artificial Sequence
  Description of Artificial Sequence: Synthetic peptide
  Seed: SIGKVCRTLLAKSVF
SIYKVMRALLAKSVF

SEQ ID NO: 275767 - protein, 15 aa, Artificial Sequence
  Description of Artificial Sequence: Synthetic peptide
  Seed: SIGKVCRTLLAKSVF
SIYKVMRALLDKSVF

SEQ ID NO: 275768 - protein, 15 aa, Artificial Sequence
  Description of Artificial Sequence: Synthetic peptide
  Seed: SIGKVCRTLLAKSVF
SIYKVMRALLEKSVF

SEQ ID NO: 275769 - protein, 15 aa, Artificial Sequence
  Description of Artificial Sequence: Synthetic peptide
  Seed: SIGKVCRTLLAKSVF
SIYKVMRALLGKSVF

SEQ ID NO: 275770 - protein, 15 aa, Artificial Sequence
  Description of Artificial Sequence: Synthetic peptide
  Seed: SIGKVCRTLLAKSVF
SIYKVMRALLHKSVF

SEQ ID NO: 275771 - protein, 15 aa, Artificial Sequence
  Description of Artificial Sequence: Synthetic peptide
  Seed: SIGKVCRTLLAKSVF
SIYKVMRALLKKSVF

SEQ ID NO: 275772 - protein, 15 aa, Artificial Sequence
  Description of Artificial Sequence: Synthetic peptide
  Seed: SIGKVCRTLLAKSVF
SIYKVMRALLMKSVF

SEQ ID NO: 275773 - protein, 15 aa, Artificial Sequence
  Description of Artificial Sequence: Synthetic peptide
  Seed: SIGKVCRTLLAKSVF
SIYKVMRALLNKSVF

SEQ ID NO: 275774 - protein, 15 aa, Artificial Sequence
  Description of Artificial Sequence: Synthetic peptide
  Seed: SIGKVCRTLLAKSVF
SIYKVMRALLPKSVF

SEQ ID NO: 275775 - protein, 15 aa, Artificial Sequence
  Description of Artificial Sequence: Synthetic peptide
  Seed: SIGKVCRTLLAKSVF
SIYKVMRALLQKSVF

SEQ ID NO: 275776 - protein, 15 aa, Artificial Sequence
  Description of Artificial Sequence: Synthetic peptide
  Seed: SIGKVCRTLLAKSVF
SIYKVMRALLRKSVF

SEQ ID NO: 275777 - protein, 15 aa, Artificial Sequence
  Description of Artificial Sequence: Synthetic peptide
  Seed: SIGKVCRTLLAKSVF
SIYKVMRALLSKSVF

SEQ ID NO: 275778 - protein, 15 aa, Artificial Sequence
  Description of Artificial Sequence: Synthetic peptide
  Seed: SIGKVCRTLLAKSVF
SIYKVMRALLTKSVF

SEQ ID NO: 275779 - protein, 15 aa, Artificial Sequence
  Description of Artificial Sequence: Synthetic peptide
  Seed: SIGKVCRTLLAKSVF
SIYKVMRALLVKSVF

SEQ ID NO: 275780 - protein, 15 aa, Artificial Sequence
  Description of Artificial Sequence: Synthetic peptide
  Seed: SIGKVCRTLLAKSVF
SIYKVMRALLYKSVF

SEQ ID NO: 275781 - protein, 15 aa, Artificial Sequence
  Description of Artificial Sequence: Synthetic peptide
  Seed: SIGKVCRTLLAKSVF
SIYKVMRDLLAKSVF

SEQ ID NO: 275782 - protein, 15 aa, Artificial Sequence
  Description of Artificial Sequence: Synthetic peptide
  Seed: SIGKVCRTLLAKSVF
SIYKVMRDLLDKSVF

SEQ ID NO: 275783 - protein, 15 aa, Artificial Sequence
  Description of Artificial Sequence: Synthetic peptide
  Seed: SIGKVCRTLLAKSVF
SIYKVMRDLLEKSVF

SEQ ID NO: 275784 - protein, 15 aa, Artificial Sequence
  Description of Artificial Sequence: Synthetic peptide
  Seed: SIGKVCRTLLAKSVF
SIYKVMRDLLRKSVF

SEQ ID NO: 275785 - protein, 15 aa, Artificial Sequence
  Description of Artificial Sequence: Synthetic peptide
  Seed: SIGKVCRTLLAKSVF
SIYKVMRDLLSKSVF

SEQ ID NO: 275786 - protein, 15 aa, Artificial Sequence
  Description of Artificial Sequence: Synthetic peptide
  Seed: SIGKVCRTLLAKSVF
SIYKVMRDLLTKSVF

SEQ ID NO: 275787 - protein, 15 aa, Artificial Sequence
  Description of Artificial Sequence: Synthetic peptide
  Seed: SIGKVCRTLLAKSVF
SIYKVMRELLAKSVF

SEQ ID NO: 275788 - protein, 15 aa, Artificial Sequence
  Description of Artificial Sequence: Synthetic peptide
  Seed: SIGKVCRTLLAKSVF
SIYKVMRELLKKSVF

SEQ ID NO: 275789 - protein, 15 aa, Artificial Sequence
  Description of Artificial Sequence: Synthetic peptide
  Seed: SIGKVCRTLLAKSVF
SIYKVMRELLRKSVF

SEQ ID NO: 275790 - protein, 15 aa, Artificial Sequence
  Description of Artificial Sequence: Synthetic peptide
  Seed: SIGKVCRTLLAKSVF
SIYKVMRELLSKSVF

SEQ ID NO: 275791 - protein, 15 aa, Artificial Sequence
  Description of Artificial Sequence: Synthetic peptide
  Seed: SIGKVCRTLLAKSVF
SIYKVMRGLLAKSVF

SEQ ID NO: 275792 - protein, 15 aa, Artificial Sequence
  Description of Artificial Sequence: Synthetic peptide
  Seed: SIGKVCRTLLAKSVF
SIYKVMRGLLDKSVF

SEQ ID NO: 275793 - protein, 15 aa, Artificial Sequence
  Description of Artificial Sequence: Synthetic peptide
  Seed: SIGKVCRTLLAKSVF
SIYKVMRGLLEKSVF

SEQ ID NO: 275794 - protein, 15 aa, Artificial Sequence
  Description of Artificial Sequence: Synthetic peptide
  Seed: SIGKVCRTLLAKSVF
SIYKVMRGLLGKSVF

SEQ ID NO: 275795 - protein, 15 aa, Artificial Sequence
  Description of Artificial Sequence: Synthetic peptide
  Seed: SIGKVCRTLLAKSVF
SIYKVMRGLLHKSVF

SEQ ID NO: 275796 - protein, 15 aa, Artificial Sequence
  Description of Artificial Sequence: Synthetic peptide
  Seed: SIGKVCRTLLAKSVF
SIYKVMRGLLIKSVF

SEQ ID NO: 275797 - protein, 15 aa, Artificial Sequence
  Description of Artificial Sequence: Synthetic peptide
  Seed: SIGKVCRTLLAKSVF
SIYKVMRGLLKKSVF

SEQ ID NO: 275798 - protein, 15 aa, Artificial Sequence
  Description of Artificial Sequence: Synthetic peptide
  Seed: SIGKVCRTLLAKSVF
SIYKVMRGLLLKSVF

SEQ ID NO: 275799 - protein, 15 aa, Artificial Sequence
  Description of Artificial Sequence: Synthetic peptide
  Seed: SIGKVCRTLLAKSVF
SIYKVMRGLLMKSVF

SEQ ID NO: 275800 - protein, 15 aa, Artificial Sequence
  Description of Artificial Sequence: Synthetic peptide
  Seed: SIGKVCRTLLAKSVF
SIYKVMRGLLNKSVF

SEQ ID NO: 275801 - protein, 15 aa, Artificial Sequence
  Description of Artificial Sequence: Synthetic peptide
  Seed: SIGKVCRTLLAKSVF
SIYKVMRGLLPKSVF

SEQ ID NO: 275802 - protein, 15 aa, Artificial Sequence
  Description of Artificial Sequence: Synthetic peptide
  Seed: SIGKVCRTLLAKSVF
SIYKVMRGLLQKSVF

SEQ ID NO: 275803 - protein, 15 aa, Artificial Sequence
  Description of Artificial Sequence: Synthetic peptide
  Seed: SIGKVCRTLLAKSVF
SIYKVMRGLLRKSVF

SEQ ID NO: 275804 - protein, 15 aa, Artificial Sequence
  Description of Artificial Sequence: Synthetic peptide
  Seed: SIGKVCRTLLAKSVF
SIYKVMRGLLSKSVF

SEQ ID NO: 275805 - protein, 15 aa, Artificial Sequence
  Description of Artificial Sequence: Synthetic peptide
  Seed: SIGKVCRTLLAKSVF
SIYKVMRGLLTKSVF

SEQ ID NO: 275806 - protein, 15 aa, Artificial Sequence
  Description of Artificial Sequence: Synthetic peptide
  Seed: SIGKVCRTLLAKSVF
SIYKVMRGLLVKSVF

SEQ ID NO: 275807 - protein, 15 aa, Artificial Sequence
  Description of Artificial Sequence: Synthetic peptide
  Seed: SIGKVCRTLLAKSVF
SIYKVMRGLLYKSVF

SEQ ID NO: 275808 - protein, 15 aa, Artificial Sequence
  Description of Artificial Sequence: Synthetic peptide
  Seed: SIGKVCRTLLAKSVF
SIYKVMRHLLAKSVF

SEQ ID NO: 275809 - protein, 15 aa, Artificial Sequence
  Description of Artificial Sequence: Synthetic peptide
  Seed: SIGKVCRTLLAKSVF
SIYKVMRHLLDKSVF

SEQ ID NO: 275810 - protein, 15 aa, Artificial Sequence
  Description of Artificial Sequence: Synthetic peptide
  Seed: SIGKVCRTLLAKSVF
SIYKVMRHLLEKSVF

SEQ ID NO: 275811 - protein, 15 aa, Artificial Sequence
  Description of Artificial Sequence: Synthetic peptide
  Seed: SIGKVCRTLLAKSVF
SIYKVMRHLLFKSVF

SEQ ID NO: 275812 - protein, 15 aa, Artificial Sequence
  Description of Artificial Sequence: Synthetic peptide
  Seed: SIGKVCRTLLAKSVF
SIYKVMRHLLGKSVF

SEQ ID NO: 275813 - protein, 15 aa, Artificial Sequence
  Description of Artificial Sequence: Synthetic peptide
  Seed: SIGKVCRTLLAKSVF
SIYKVMRHLLHKSVF

SEQ ID NO: 275814 - protein, 15 aa, Artificial Sequence
  Description of Artificial Sequence: Synthetic peptide
  Seed: SIGKVCRTLLAKSVF
SIYKVMRHLLIKSVF

SEQ ID NO: 275815 - protein, 15 aa, Artificial Sequence
  Description of Artificial Sequence: Synthetic peptide
  Seed: SIGKVCRTLLAKSVF
SIYKVMRHLLKKSVF

SEQ ID NO: 275816 - protein, 15 aa, Artificial Sequence
  Description of Artificial Sequence: Synthetic peptide
  Seed: SIGKVCRTLLAKSVF
SIYKVMRHLLLKSVF

SEQ ID NO: 275817 - protein, 15 aa, Artificial Sequence
  Description of Artificial Sequence: Synthetic peptide
  Seed: SIGKVCRTLLAKSVF
SIYKVMRHLLMKSVF

SEQ ID NO: 275818 - protein, 15 aa, Artificial Sequence
  Description of Artificial Sequence: Synthetic peptide
  Seed: SIGKVCRTLLAKSVF
SIYKVMRHLLNKSVF

SEQ ID NO: 275819 - protein, 15 aa, Artificial Sequence
  Description of Artificial Sequence: Synthetic peptide
  Seed: SIGKVCRTLLAKSVF
SIYKVMRHLLPKSVF

SEQ ID NO: 275820 - protein, 15 aa, Artificial Sequence
  Description of Artificial Sequence: Synthetic peptide
  Seed: SIGKVCRTLLAKSVF
SIYKVMRHLLQKSVF

SEQ ID NO: 275821 - protein, 15 aa, Artificial Sequence
  Description of Artificial Sequence: Synthetic peptide
  Seed: SIGKVCRTLLAKSVF
SIYKVMRHLLRKSVF

SEQ ID NO: 275822 - protein, 15 aa, Artificial Sequence
  Description of Artificial Sequence: Synthetic peptide
  Seed: SIGKVCRTLLAKSVF
SIYKVMRHLLSKSVF

SEQ ID NO: 275823 - protein, 15 aa, Artificial Sequence
  Description of Artificial Sequence: Synthetic peptide
  Seed: SIGKVCRTLLAKSVF
SIYKVMRHLLTKSVF

SEQ ID NO: 275824 - protein, 15 aa, Artificial Sequence
  Description of Artificial Sequence: Synthetic peptide
  Seed: SIGKVCRTLLAKSVF
SIYKVMRHLLVKSVF

SEQ ID NO: 275825 - protein, 15 aa, Artificial Sequence
  Description of Artificial Sequence: Synthetic peptide
  Seed: SIGKVCRTLLAKSVF
SIYKVMRHLLYKSVF

SEQ ID NO: 275826 - protein, 15 aa, Artificial Sequence
  Description of Artificial Sequence: Synthetic peptide
  Seed: SIGKVCRTLLAKSVF
SIYKVMRILLAKSVF

SEQ ID NO: 275827 - protein, 15 aa, Artificial Sequence
  Description of Artificial Sequence: Synthetic peptide
  Seed: SIGKVCRTLLAKSVF
SIYKVMRILLDKSVF

SEQ ID NO: 275828 - protein, 15 aa, Artificial Sequence
  Description of Artificial Sequence: Synthetic peptide
  Seed: SIGKVCRTLLAKSVF
SIYKVMRILLEKSVF

SEQ ID NO: 275829 - protein, 15 aa, Artificial Sequence
  Description of Artificial Sequence: Synthetic peptide
  Seed: SIGKVCRTLLAKSVF
SIYKVMRILLHKSVF

SEQ ID NO: 275830 - protein, 15 aa, Artificial Sequence
  Description of Artificial Sequence: Synthetic peptide
  Seed: SIGKVCRTLLAKSVF
SIYKVMRILLKKSVF

SEQ ID NO: 275831 - protein, 15 aa, Artificial Sequence
  Description of Artificial Sequence: Synthetic peptide
  Seed: SIGKVCRTLLAKSVF
SIYKVMRILLNKSVF

SEQ ID NO: 275832 - protein, 15 aa, Artificial Sequence
  Description of Artificial Sequence: Synthetic peptide
  Seed: SIGKVCRTLLAKSVF
SIYKVMRILLPKSVF

SEQ ID NO: 275833 - protein, 15 aa, Artificial Sequence
  Description of Artificial Sequence: Synthetic peptide
  Seed: SIGKVCRTLLAKSVF
SIYKVMRILLSKSVF

SEQ ID NO: 275834 - protein, 15 aa, Artificial Sequence
  Description of Artificial Sequence: Synthetic peptide
  Seed: SIGKVCRTLLAKSVF
SIYKVMRILLTKSVF

SEQ ID NO: 275835 - protein, 15 aa, Artificial Sequence
  Description of Artificial Sequence: Synthetic peptide
  Seed: SIGKVCRTLLAKSVF
SIYKVMRKLLAKSVF

SEQ ID NO: 275836 - protein, 15 aa, Artificial Sequence
  Description of Artificial Sequence: Synthetic peptide
  Seed: SIGKVCRTLLAKSVF
SIYKVMRKLLCKSVF

SEQ ID NO: 275837 - protein, 15 aa, Artificial Sequence
  Description of Artificial Sequence: Synthetic peptide
  Seed: SIGKVCRTLLAKSVF
SIYKVMRKLLDKSVF

SEQ ID NO: 275838 - protein, 15 aa, Artificial Sequence
  Description of Artificial Sequence: Synthetic peptide
  Seed: SIGKVCRTLLAKSVF
SIYKVMRKLLEKSVF

SEQ ID NO: 275839 - protein, 15 aa, Artificial Sequence
  Description of Artificial Sequence: Synthetic peptide
  Seed: SIGKVCRTLLAKSVF
SIYKVMRKLLFKSVF

SEQ ID NO: 275840 - protein, 15 aa, Artificial Sequence
  Description of Artificial Sequence: Synthetic peptide
  Seed: SIGKVCRTLLAKSVF
SIYKVMRKLLGKSVF

SEQ ID NO: 275841 - protein, 15 aa, Artificial Sequence
  Description of Artificial Sequence: Synthetic peptide
  Seed: SIGKVCRTLLAKSVF
SIYKVMRKLLHKSVF

SEQ ID NO: 275842 - protein, 15 aa, Artificial Sequence
  Description of Artificial Sequence: Synthetic peptide
  Seed: SIGKVCRTLLAKSVF
SIYKVMRKLLIKSVF

SEQ ID NO: 275843 - protein, 15 aa, Artificial Sequence
  Description of Artificial Sequence: Synthetic peptide
  Seed: SIGKVCRTLLAKSVF
SIYKVMRKLLKKSVF

SEQ ID NO: 275844 - protein, 15 aa, Artificial Sequence
  Description of Artificial Sequence: Synthetic peptide
  Seed: SIGKVCRTLLAKSVF
SIYKVMRKLLLKSVF

SEQ ID NO: 275845 - protein, 15 aa, Artificial Sequence
  Description of Artificial Sequence: Synthetic peptide
  Seed: SIGKVCRTLLAKSVF
SIYKVMRKLLMKSVF

SEQ ID NO: 275846 - protein, 15 aa, Artificial Sequence
  Description of Artificial Sequence: Synthetic peptide
  Seed: SIGKVCRTLLAKSVF
SIYKVMRKLLNKSVF

SEQ ID NO: 275847 - protein, 15 aa, Artificial Sequence
  Description of Artificial Sequence: Synthetic peptide
  Seed: SIGKVCRTLLAKSVF
SIYKVMRKLLPKSVF

SEQ ID NO: 275848 - protein, 15 aa, Artificial Sequence
  Description of Artificial Sequence: Synthetic peptide
  Seed: SIGKVCRTLLAKSVF
SIYKVMRKLLQKSVF

SEQ ID NO: 275849 - protein, 15 aa, Artificial Sequence
  Description of Artificial Sequence: Synthetic peptide
  Seed: SIGKVCRTLLAKSVF
SIYKVMRKLLRKSVF

SEQ ID NO: 275850 - protein, 15 aa, Artificial Sequence
  Description of Artificial Sequence: Synthetic peptide
  Seed: SIGKVCRTLLAKSVF
SIYKVMRKLLSKSVF

SEQ ID NO: 275851 - protein, 15 aa, Artificial Sequence
  Description of Artificial Sequence: Synthetic peptide
  Seed: SIGKVCRTLLAKSVF
SIYKVMRKLLTKSVF

SEQ ID NO: 275852 - protein, 15 aa, Artificial Sequence
  Description of Artificial Sequence: Synthetic peptide
  Seed: SIGKVCRTLLAKSVF
SIYKVMRKLLVKSVF

SEQ ID NO: 275853 - protein, 15 aa, Artificial Sequence
  Description of Artificial Sequence: Synthetic peptide
  Seed: SIGKVCRTLLAKSVF
SIYKVMRKLLWKSVF

SEQ ID NO: 275854 - protein, 15 aa, Artificial Sequence
  Description of Artificial Sequence: Synthetic peptide
  Seed: SIGKVCRTLLAKSVF
SIYKVMRKLLYKSVF

SEQ ID NO: 275855 - protein, 15 aa, Artificial Sequence
  Description of Artificial Sequence: Synthetic peptide
  Seed: SIGKVCRTLLAKSVF
SIYKVMRLLLHKSVF

SEQ ID NO: 275856 - protein, 15 aa, Artificial Sequence
  Description of Artificial Sequence: Synthetic peptide
  Seed: SIGKVCRTLLAKSVF
SIYKVMRLLLSKSVF

SEQ ID NO: 275857 - protein, 15 aa, Artificial Sequence
  Description of Artificial Sequence: Synthetic peptide
  Seed: SIGKVCRTLLAKSVF
SIYKVMRMLLAKSVF

SEQ ID NO: 275858 - protein, 15 aa, Artificial Sequence
  Description of Artificial Sequence: Synthetic peptide
  Seed: SIGKVCRTLLAKSVF
SIYKVMRMLLHKSVF

SEQ ID NO: 275859 - protein, 15 aa, Artificial Sequence
  Description of Artificial Sequence: Synthetic peptide
  Seed: SIGKVCRTLLAKSVF
SIYKVMRMLLQKSVF

SEQ ID NO: 275860 - protein, 15 aa, Artificial Sequence
  Description of Artificial Sequence: Synthetic peptide
  Seed: SIGKVCRTLLAKSVF
SIYKVMRMLLSKSVF

SEQ ID NO: 275861 - protein, 15 aa, Artificial Sequence
  Description of Artificial Sequence: Synthetic peptide
  Seed: SIGKVCRTLLAKSVF
SIYKVMRNLLAKSVF

SEQ ID NO: 275862 - protein, 15 aa, Artificial Sequence
  Description of Artificial Sequence: Synthetic peptide
  Seed: SIGKVCRTLLAKSVF
SIYKVMRNLLCKSVF

SEQ ID NO: 275863 - protein, 15 aa, Artificial Sequence
  Description of Artificial Sequence: Synthetic peptide
  Seed: SIGKVCRTLLAKSVF
SIYKVMRNLLDKSVF

SEQ ID NO: 275864 - protein, 15 aa, Artificial Sequence
  Description of Artificial Sequence: Synthetic peptide
  Seed: SIGKVCRTLLAKSVF
SIYKVMRNLLEKSVF

SEQ ID NO: 275865 - protein, 15 aa, Artificial Sequence
  Description of Artificial Sequence: Synthetic peptide
  Seed: SIGKVCRTLLAKSVF
SIYKVMRNLLGKSVF

SEQ ID NO: 275866 - protein, 15 aa, Artificial Sequence
  Description of Artificial Sequence: Synthetic peptide
  Seed: SIGKVCRTLLAKSVF
SIYKVMRNLLHKSVF

SEQ ID NO: 275867 - protein, 15 aa, Artificial Sequence
  Description of Artificial Sequence: Synthetic peptide
  Seed: SIGKVCRTLLAKSVF
SIYKVMRNLLIKSVF

SEQ ID NO: 275868 - protein, 15 aa, Artificial Sequence
  Description of Artificial Sequence: Synthetic peptide
  Seed: SIGKVCRTLLAKSVF
SIYKVMRNLLKKSVF

SEQ ID NO: 275869 - protein, 15 aa, Artificial Sequence
  Description of Artificial Sequence: Synthetic peptide
  Seed: SIGKVCRTLLAKSVF
SIYKVMRNLLLKSVF

SEQ ID NO: 275870 - protein, 15 aa, Artificial Sequence
  Description of Artificial Sequence: Synthetic peptide
  Seed: SIGKVCRTLLAKSVF
SIYKVMRNLLMKSVF

SEQ ID NO: 275871 - protein, 15 aa, Artificial Sequence
  Description of Artificial Sequence: Synthetic peptide
  Seed: SIGKVCRTLLAKSVF
SIYKVMRNLLNKSVF

SEQ ID NO: 275872 - protein, 15 aa, Artificial Sequence
  Description of Artificial Sequence: Synthetic peptide
  Seed: SIGKVCRTLLAKSVF
SIYKVMRNLLPKSVF

SEQ ID NO: 275873 - protein, 15 aa, Artificial Sequence
  Description of Artificial Sequence: Synthetic peptide
  Seed: SIGKVCRTLLAKSVF
SIYKVMRNLLQKSVF

SEQ ID NO: 275874 - protein, 15 aa, Artificial Sequence
  Description of Artificial Sequence: Synthetic peptide
  Seed: SIGKVCRTLLAKSVF
SIYKVMRNLLRKSVF

SEQ ID NO: 275875 - protein, 15 aa, Artificial Sequence
  Description of Artificial Sequence: Synthetic peptide
  Seed: SIGKVCRTLLAKSVF
SIYKVMRNLLSKSVF

SEQ ID NO: 275876 - protein, 15 aa, Artificial Sequence
  Description of Artificial Sequence: Synthetic peptide
  Seed: SIGKVCRTLLAKSVF
SIYKVMRNLLTKSVF

SEQ ID NO: 275877 - protein, 15 aa, Artificial Sequence
  Description of Artificial Sequence: Synthetic peptide
  Seed: SIGKVCRTLLAKSVF
SIYKVMRNLLVKSVF

SEQ ID NO: 275878 - protein, 15 aa, Artificial Sequence
  Description of Artificial Sequence: Synthetic peptide
  Seed: SIGKVCRTLLAKSVF
SIYKVMRNLLYKSVF

SEQ ID NO: 275879 - protein, 15 aa, Artificial Sequence
  Description of Artificial Sequence: Synthetic peptide
  Seed: SIGKVCRTLLAKSVF
SIYKVMRPLLAKSVF

SEQ ID NO: 275880 - protein, 15 aa, Artificial Sequence
  Description of Artificial Sequence: Synthetic peptide
  Seed: SIGKVCRTLLAKSVF
SIYKVMRPLLDKSVF

SEQ ID NO: 275881 - protein, 15 aa, Artificial Sequence
  Description of Artificial Sequence: Synthetic peptide
  Seed: SIGKVCRTLLAKSVF
SIYKVMRPLLEKSVF

SEQ ID NO: 275882 - protein, 15 aa, Artificial Sequence
  Description of Artificial Sequence: Synthetic peptide
  Seed: SIGKVCRTLLAKSVF
SIYKVMRPLLFKSVF

SEQ ID NO: 275883 - protein, 15 aa, Artificial Sequence
  Description of Artificial Sequence: Synthetic peptide
  Seed: SIGKVCRTLLAKSVF
SIYKVMRPLLGKSVF

SEQ ID NO: 275884 - protein, 15 aa, Artificial Sequence
  Description of Artificial Sequence: Synthetic peptide
  Seed: SIGKVCRTLLAKSVF
SIYKVMRPLLHKSVF

SEQ ID NO: 275885 - protein, 15 aa, Artificial Sequence
  Description of Artificial Sequence: Synthetic peptide
  Seed: SIGKVCRTLLAKSVF
SIYKVMRPLLIKSVF

SEQ ID NO: 275886 - protein, 15 aa, Artificial Sequence
  Description of Artificial Sequence: Synthetic peptide
  Seed: SIGKVCRTLLAKSVF
SIYKVMRPLLKKSVF

SEQ ID NO: 275887 - protein, 15 aa, Artificial Sequence
  Description of Artificial Sequence: Synthetic peptide
  Seed: SIGKVCRTLLAKSVF
SIYKVMRPLLLKSVF

SEQ ID NO: 275888 - protein, 15 aa, Artificial Sequence
  Description of Artificial Sequence: Synthetic peptide
  Seed: SIGKVCRTLLAKSVF
SIYKVMRPLLMKSVF

SEQ ID NO: 275889 - protein, 15 aa, Artificial Sequence
  Description of Artificial Sequence: Synthetic peptide
  Seed: SIGKVCRTLLAKSVF
SIYKVMRPLLNKSVF

SEQ ID NO: 275890 - protein, 15 aa, Artificial Sequence
  Description of Artificial Sequence: Synthetic peptide
  Seed: SIGKVCRTLLAKSVF
SIYKVMRPLLPKSVF

SEQ ID NO: 275891 - protein, 15 aa, Artificial Sequence
  Description of Artificial Sequence: Synthetic peptide
  Seed: SIGKVCRTLLAKSVF
SIYKVMRPLLQKSVF

SEQ ID NO: 275892 - protein, 15 aa, Artificial Sequence
  Description of Artificial Sequence: Synthetic peptide
  Seed: SIGKVCRTLLAKSVF
SIYKVMRPLLRKSVF

SEQ ID NO: 275893 - protein, 15 aa, Artificial Sequence
  Description of Artificial Sequence: Synthetic peptide
  Seed: SIGKVCRTLLAKSVF
SIYKVMRPLLSKSVF

SEQ ID NO: 275894 - protein, 15 aa, Artificial Sequence
  Description of Artificial Sequence: Synthetic peptide
  Seed: SIGKVCRTLLAKSVF
SIYKVMRPLLTKSVF

SEQ ID NO: 275895 - protein, 15 aa, Artificial Sequence
  Description of Artificial Sequence: Synthetic peptide
  Seed: SIGKVCRTLLAKSVF
SIYKVMRPLLVKSVF

SEQ ID NO: 275896 - protein, 15 aa, Artificial Sequence
  Description of Artificial Sequence: Synthetic peptide
  Seed: SIGKVCRTLLAKSVF
SIYKVMRPLLYKSVF

SEQ ID NO: 275897 - protein, 15 aa, Artificial Sequence
  Description of Artificial Sequence: Synthetic peptide
  Seed: SIGKVCRTLLAKSVF
SIYKVMRQLLAKSVF

SEQ ID NO: 275898 - protein, 15 aa, Artificial Sequence
  Description of Artificial Sequence: Synthetic peptide
  Seed: SIGKVCRTLLAKSVF
SIYKVMRQLLGKSVF

SEQ ID NO: 275899 - protein, 15 aa, Artificial Sequence
  Description of Artificial Sequence: Synthetic peptide
  Seed: SIGKVCRTLLAKSVF
SIYKVMRQLLHKSVF

SEQ ID NO: 275900 - protein, 15 aa, Artificial Sequence
  Description of Artificial Sequence: Synthetic peptide
  Seed: SIGKVCRTLLAKSVF
SIYKVMRQLLKKSVF

SEQ ID NO: 275901 - protein, 15 aa, Artificial Sequence
  Description of Artificial Sequence: Synthetic peptide
  Seed: SIGKVCRTLLAKSVF
SIYKVMRQLLNKSVF

SEQ ID NO: 275902 - protein, 15 aa, Artificial Sequence
  Description of Artificial Sequence: Synthetic peptide
  Seed: SIGKVCRTLLAKSVF
SIYKVMRQLLPKSVF

SEQ ID NO: 275903 - protein, 15 aa, Artificial Sequence
  Description of Artificial Sequence: Synthetic peptide
  Seed: SIGKVCRTLLAKSVF
SIYKVMRQLLQKSVF

SEQ ID NO: 275904 - protein, 15 aa, Artificial Sequence
  Description of Artificial Sequence: Synthetic peptide
  Seed: SIGKVCRTLLAKSVF
SIYKVMRQLLRKSVF

SEQ ID NO: 275905 - protein, 15 aa, Artificial Sequence
  Description of Artificial Sequence: Synthetic peptide
  Seed: SIGKVCRTLLAKSVF
SIYKVMRQLLSKSVF

SEQ ID NO: 275906 - protein, 15 aa, Artificial Sequence
  Description of Artificial Sequence: Synthetic peptide
  Seed: SIGKVCRTLLAKSVF
SIYKVMRQLLTKSVF

SEQ ID NO: 275907 - protein, 15 aa, Artificial Sequence
  Description of Artificial Sequence: Synthetic peptide
  Seed: SIGKVCRTLLAKSVF
SIYKVMRRLLAKSVF

SEQ ID NO: 275908 - protein, 15 aa, Artificial Sequence
  Description of Artificial Sequence: Synthetic peptide
  Seed: SIGKVCRTLLAKSVF
SIYKVMRRLLCKSVF

SEQ ID NO: 275909 - protein, 15 aa, Artificial Sequence
  Description of Artificial Sequence: Synthetic peptide
  Seed: SIGKVCRTLLAKSVF
SIYKVMRRLLDKSVF

SEQ ID NO: 275910 - protein, 15 aa, Artificial Sequence
  Description of Artificial Sequence: Synthetic peptide
  Seed: SIGKVCRTLLAKSVF
SIYKVMRRLLEKSVF

SEQ ID NO: 275911 - protein, 15 aa, Artificial Sequence
  Description of Artificial Sequence: Synthetic peptide
  Seed: SIGKVCRTLLAKSVF
SIYKVMRRLLFKSVF

SEQ ID NO: 275912 - protein, 15 aa, Artificial Sequence
  Description of Artificial Sequence: Synthetic peptide
  Seed: SIGKVCRTLLAKSVF
SIYKVMRRLLGKSVF

SEQ ID NO: 275913 - protein, 15 aa, Artificial Sequence
  Description of Artificial Sequence: Synthetic peptide
  Seed: SIGKVCRTLLAKSVF
SIYKVMRRLLHKSVF

SEQ ID NO: 275914 - protein, 15 aa, Artificial Sequence
  Description of Artificial Sequence: Synthetic peptide
  Seed: SIGKVCRTLLAKSVF
SIYKVMRRLLIKSVF

SEQ ID NO: 275915 - protein, 15 aa, Artificial Sequence
  Description of Artificial Sequence: Synthetic peptide
  Seed: SIGKVCRTLLAKSVF
SIYKVMRRLLKKSVF

SEQ ID NO: 275916 - protein, 15 aa, Artificial Sequence
  Description of Artificial Sequence: Synthetic peptide
  Seed: SIGKVCRTLLAKSVF
SIYKVMRRLLLKSVF

SEQ ID NO: 275917 - protein, 15 aa, Artificial Sequence
  Description of Artificial Sequence: Synthetic peptide
  Seed: SIGKVCRTLLAKSVF
SIYKVMRRLLMKSVF

SEQ ID NO: 275918 - protein, 15 aa, Artificial Sequence
  Description of Artificial Sequence: Synthetic peptide
  Seed: SIGKVCRTLLAKSVF
SIYKVMRRLLNKSVF

SEQ ID NO: 275919 - protein, 15 aa, Artificial Sequence
  Description of Artificial Sequence: Synthetic peptide
  Seed: SIGKVCRTLLAKSVF
SIYKVMRRLLPKSVF

SEQ ID NO: 275920 - protein, 15 aa, Artificial Sequence
  Description of Artificial Sequence: Synthetic peptide
  Seed: SIGKVCRTLLAKSVF
SIYKVMRRLLQKSVF

SEQ ID NO: 275921 - protein, 15 aa, Artificial Sequence
  Description of Artificial Sequence: Synthetic peptide
  Seed: SIGKVCRTLLAKSVF
SIYKVMRRLLRKSVF

SEQ ID NO: 275922 - protein, 15 aa, Artificial Sequence
  Description of Artificial Sequence: Synthetic peptide
  Seed: SIGKVCRTLLAKSVF
SIYKVMRRLLSKSVF

SEQ ID NO: 275923 - protein, 15 aa, Artificial Sequence
  Description of Artificial Sequence: Synthetic peptide
  Seed: SIGKVCRTLLAKSVF
SIYKVMRRLLTKSVF

SEQ ID NO: 275924 - protein, 15 aa, Artificial Sequence
  Description of Artificial Sequence: Synthetic peptide
  Seed: SIGKVCRTLLAKSVF
SIYKVMRRLLVKSVF

SEQ ID NO: 275925 - protein, 15 aa, Artificial Sequence
  Description of Artificial Sequence: Synthetic peptide
  Seed: SIGKVCRTLLAKSVF
SIYKVMRRLLWKSVF

SEQ ID NO: 275926 - protein, 15 aa, Artificial Sequence
  Description of Artificial Sequence: Synthetic peptide
  Seed: SIGKVCRTLLAKSVF
SIYKVMRRLLYKSVF

SEQ ID NO: 275927 - protein, 15 aa, Artificial Sequence
  Description of Artificial Sequence: Synthetic peptide
  Seed: SIGKVCRTLLAKSVF
SIYKVMRSLLAKSVF

SEQ ID NO: 275928 - protein, 15 aa, Artificial Sequence
  Description of Artificial Sequence: Synthetic peptide
  Seed: SIGKVCRTLLAKSVF
SIYKVMRSLLDKSVF

SEQ ID NO: 275929 - protein, 15 aa, Artificial Sequence
  Description of Artificial Sequence: Synthetic peptide
  Seed: SIGKVCRTLLAKSVF
SIYKVMRSLLEKSVF

SEQ ID NO: 275930 - protein, 15 aa, Artificial Sequence
  Description of Artificial Sequence: Synthetic peptide
  Seed: SIGKVCRTLLAKSVF
SIYKVMRSLLGKSVF

SEQ ID NO: 275931 - protein, 15 aa, Artificial Sequence
  Description of Artificial Sequence: Synthetic peptide
  Seed: SIGKVCRTLLAKSVF
SIYKVMRSLLHKSVF

SEQ ID NO: 275932 - protein, 15 aa, Artificial Sequence
  Description of Artificial Sequence: Synthetic peptide
  Seed: SIGKVCRTLLAKSVF
SIYKVMRSLLIKSVF

SEQ ID NO: 275933 - protein, 15 aa, Artificial Sequence
  Description of Artificial Sequence: Synthetic peptide
  Seed: SIGKVCRTLLAKSVF
SIYKVMRSLLKKSVF

SEQ ID NO: 275934 - protein, 15 aa, Artificial Sequence
  Description of Artificial Sequence: Synthetic peptide
  Seed: SIGKVCRTLLAKSVF
SIYKVMRSLLLKSVF

SEQ ID NO: 275935 - protein, 15 aa, Artificial Sequence
  Description of Artificial Sequence: Synthetic peptide
  Seed: SIGKVCRTLLAKSVF
SIYKVMRSLLMKSVF

SEQ ID NO: 275936 - protein, 15 aa, Artificial Sequence
  Description of Artificial Sequence: Synthetic peptide
  Seed: SIGKVCRTLLAKSVF
SIYKVMRSLLNKSVF

SEQ ID NO: 275937 - protein, 15 aa, Artificial Sequence
  Description of Artificial Sequence: Synthetic peptide
  Seed: SIGKVCRTLLAKSVF
SIYKVMRSLLPKSVF

SEQ ID NO: 275938 - protein, 15 aa, Artificial Sequence
  Description of Artificial Sequence: Synthetic peptide
  Seed: SIGKVCRTLLAKSVF
SIYKVMRSLLQKSVF

SEQ ID NO: 275939 - protein, 15 aa, Artificial Sequence
  Description of Artificial Sequence: Synthetic peptide
  Seed: SIGKVCRTLLAKSVF
SIYKVMRSLLRKSVF

SEQ ID NO: 275940 - protein, 15 aa, Artificial Sequence
  Description of Artificial Sequence: Synthetic peptide
  Seed: SIGKVCRTLLAKSVF
SIYKVMRSLLSKSVF

SEQ ID NO: 275941 - protein, 15 aa, Artificial Sequence
  Description of Artificial Sequence: Synthetic peptide
  Seed: SIGKVCRTLLAKSVF
SIYKVMRSLLTKSVF

SEQ ID NO: 275942 - protein, 15 aa, Artificial Sequence
  Description of Artificial Sequence: Synthetic peptide
  Seed: SIGKVCRTLLAKSVF
SIYKVMRSLLVKSVF

SEQ ID NO: 275943 - protein, 15 aa, Artificial Sequence
  Description of Artificial Sequence: Synthetic peptide
  Seed: SIGKVCRTLLAKSVF
SIYKVMRSLLYKSVF

SEQ ID NO: 275944 - protein, 15 aa, Artificial Sequence
  Description of Artificial Sequence: Synthetic peptide
  Seed: SIGKVCRTLLAKSVF
SIYKVMRTLLAKSVF

SEQ ID NO: 275945 - protein, 15 aa, Artificial Sequence
  Description of Artificial Sequence: Synthetic peptide
  Seed: SIGKVCRTLLAKSVF
SIYKVMRTLLDKSVF

SEQ ID NO: 275946 - protein, 15 aa, Artificial Sequence
  Description of Artificial Sequence: Synthetic peptide
  Seed: SIGKVCRTLLAKSVF
SIYKVMRTLLEKSVF

SEQ ID NO: 275947 - protein, 15 aa, Artificial Sequence
  Description of Artificial Sequence: Synthetic peptide
  Seed: SIGKVCRTLLAKSVF
SIYKVMRTLLGKSVF

SEQ ID NO: 275948 - protein, 15 aa, Artificial Sequence
  Description of Artificial Sequence: Synthetic peptide
  Seed: SIGKVCRTLLAKSVF
SIYKVMRTLLHKSVF

SEQ ID NO: 275949 - protein, 15 aa, Artificial Sequence
  Description of Artificial Sequence: Synthetic peptide
  Seed: SIGKVCRTLLAKSVF
SIYKVMRTLLIKSVF

SEQ ID NO: 275950 - protein, 15 aa, Artificial Sequence
  Description of Artificial Sequence: Synthetic peptide
  Seed: SIGKVCRTLLAKSVF
SIYKVMRTLLKKSVF

SEQ ID NO: 275951 - protein, 15 aa, Artificial Sequence
  Description of Artificial Sequence: Synthetic peptide
  Seed: SIGKVCRTLLAKSVF
SIYKVMRTLLLKSVF

SEQ ID NO: 275952 - protein, 15 aa, Artificial Sequence
  Description of Artificial Sequence: Synthetic peptide
  Seed: SIGKVCRTLLAKSVF
SIYKVMRTLLMKSVF

SEQ ID NO: 275953 - protein, 15 aa, Artificial Sequence
  Description of Artificial Sequence: Synthetic peptide
  Seed: SIGKVCRTLLAKSVF
SIYKVMRTLLNKSVF

SEQ ID NO: 275954 - protein, 15 aa, Artificial Sequence
  Description of Artificial Sequence: Synthetic peptide
  Seed: SIGKVCRTLLAKSVF
SIYKVMRTLLPKSVF

SEQ ID NO: 275955 - protein, 15 aa, Artificial Sequence
  Description of Artificial Sequence: Synthetic peptide
  Seed: SIGKVCRTLLAKSVF
SIYKVMRTLLQKSVF

SEQ ID NO: 275956 - protein, 15 aa, Artificial Sequence
  Description of Artificial Sequence: Synthetic peptide
  Seed: SIGKVCRTLLAKSVF
SIYKVMRTLLRKSVF

SEQ ID NO: 275957 - protein, 15 aa, Artificial Sequence
  Description of Artificial Sequence: Synthetic peptide
  Seed: SIGKVCRTLLAKSVF
SIYKVMRTLLSKSVF

SEQ ID NO: 275958 - protein, 15 aa, Artificial Sequence
  Description of Artificial Sequence: Synthetic peptide
  Seed: SIGKVCRTLLAKSVF
SIYKVMRTLLTKSVF

SEQ ID NO: 275959 - protein, 15 aa, Artificial Sequence
  Description of Artificial Sequence: Synthetic peptide
  Seed: SIGKVCRTLLAKSVF
SIYKVMRTLLVKSVF

SEQ ID NO: 275960 - protein, 15 aa, Artificial Sequence
  Description of Artificial Sequence: Synthetic peptide
  Seed: SIGKVCRTLLAKSVF
SIYKVMRTLLYKSVF

SEQ ID NO: 275961 - protein, 15 aa, Artificial Sequence
  Description of Artificial Sequence: Synthetic peptide
  Seed: SIGKVCRTLLAKSVF
SIYKVMRVLLAKSVF

SEQ ID NO: 275962 - protein, 15 aa, Artificial Sequence
  Description of Artificial Sequence: Synthetic peptide
  Seed: SIGKVCRTLLAKSVF
SIYKVMRVLLDKSVF

SEQ ID NO: 275963 - protein, 15 aa, Artificial Sequence
  Description of Artificial Sequence: Synthetic peptide
  Seed: SIGKVCRTLLAKSVF
SIYKVMRVLLEKSVF

SEQ ID NO: 275964 - protein, 15 aa, Artificial Sequence
  Description of Artificial Sequence: Synthetic peptide
  Seed: SIGKVCRTLLAKSVF
SIYKVMRVLLGKSVF

SEQ ID NO: 275965 - protein, 15 aa, Artificial Sequence
  Description of Artificial Sequence: Synthetic peptide
  Seed: SIGKVCRTLLAKSVF
SIYKVMRVLLHKSVF

SEQ ID NO: 275966 - protein, 15 aa, Artificial Sequence
  Description of Artificial Sequence: Synthetic peptide
  Seed: SIGKVCRTLLAKSVF
SIYKVMRVLLKKSVF

SEQ ID NO: 275967 - protein, 15 aa, Artificial Sequence
  Description of Artificial Sequence: Synthetic peptide
  Seed: SIGKVCRTLLAKSVF
SIYKVMRVLLNKSVF

SEQ ID NO: 275968 - protein, 15 aa, Artificial Sequence
  Description of Artificial Sequence: Synthetic peptide
  Seed: SIGKVCRTLLAKSVF
SIYKVMRVLLRKSVF

SEQ ID NO: 275969 - protein, 15 aa, Artificial Sequence
  Description of Artificial Sequence: Synthetic peptide
  Seed: SIGKVCRTLLAKSVF
SIYKVMRVLLSKSVF

SEQ ID NO: 275970 - protein, 15 aa, Artificial Sequence
  Description of Artificial Sequence: Synthetic peptide
  Seed: SIGKVCRTLLAKSVF
SIYKVMRVLLTKSVF

SEQ ID NO: 275971 - protein, 15 aa, Artificial Sequence
  Description of Artificial Sequence: Synthetic peptide
  Seed: SIGKVCRTLLAKSVF
SIYKVMRYLLSKSVF

SEQ ID NO: 275972 - protein, 15 aa, Artificial Sequence
  Description of Artificial Sequence: Synthetic peptide
  Seed: SIGKVCRTLLAKSVF
SIYKVNRALLAKSVF

SEQ ID NO: 275973 - protein, 15 aa, Artificial Sequence
  Description of Artificial Sequence: Synthetic peptide
  Seed: SIGKVCRTLLAKSVF
SIYKVNRALLGKSVF

SEQ ID NO: 275974 - protein, 15 aa, Artificial Sequence
  Description of Artificial Sequence: Synthetic peptide
  Seed: SIGKVCRTLLAKSVF
SIYKVNRALLHKSVF

SEQ ID NO: 275975 - protein, 15 aa, Artificial Sequence
  Description of Artificial Sequence: Synthetic peptide
  Seed: SIGKVCRTLLAKSVF
SIYKVNRALLKKSVF

SEQ ID NO: 275976 - protein, 15 aa, Artificial Sequence
  Description of Artificial Sequence: Synthetic peptide
  Seed: SIGKVCRTLLAKSVF
SIYKVNRALLQKSVF

SEQ ID NO: 275977 - protein, 15 aa, Artificial Sequence
  Description of Artificial Sequence: Synthetic peptide
  Seed: SIGKVCRTLLAKSVF
SIYKVNRALLRKSVF

SEQ ID NO: 275978 - protein, 15 aa, Artificial Sequence
  Description of Artificial Sequence: Synthetic peptide
  Seed: SIGKVCRTLLAKSVF
SIYKVNRALLSKSVF

SEQ ID NO: 275979 - protein, 15 aa, Artificial Sequence
  Description of Artificial Sequence: Synthetic peptide
  Seed: SIGKVCRTLLAKSVF
SIYKVNRHLLAKSVF

SEQ ID NO: 275980 - protein, 15 aa, Artificial Sequence
  Description of Artificial Sequence: Synthetic peptide
  Seed: SIGKVCRTLLAKSVF
SIYKVNRHLLSKSVF

SEQ ID NO: 275981 - protein, 15 aa, Artificial Sequence
  Description of Artificial Sequence: Synthetic peptide
  Seed: SIGKVCRTLLAKSVF
SIYKVNRKLLAKSVF

SEQ ID NO: 275982 - protein, 15 aa, Artificial Sequence
  Description of Artificial Sequence: Synthetic peptide
  Seed: SIGKVCRTLLAKSVF
SIYKVNRKLLFKSVF

SEQ ID NO: 275983 - protein, 15 aa, Artificial Sequence
  Description of Artificial Sequence: Synthetic peptide
  Seed: SIGKVCRTLLAKSVF
SIYKVNRKLLGKSVF

SEQ ID NO: 275984 - protein, 15 aa, Artificial Sequence
  Description of Artificial Sequence: Synthetic peptide
  Seed: SIGKVCRTLLAKSVF
SIYKVNRKLLHKSVF

SEQ ID NO: 275985 - protein, 15 aa, Artificial Sequence
  Description of Artificial Sequence: Synthetic peptide
  Seed: SIGKVCRTLLAKSVF
SIYKVNRKLLIKSVF

SEQ ID NO: 275986 - protein, 15 aa, Artificial Sequence
  Description of Artificial Sequence: Synthetic peptide
  Seed: SIGKVCRTLLAKSVF
SIYKVNRKLLKKSVF

SEQ ID NO: 275987 - protein, 15 aa, Artificial Sequence
  Description of Artificial Sequence: Synthetic peptide
  Seed: SIGKVCRTLLAKSVF
SIYKVNRKLLLKSVF

SEQ ID NO: 275988 - protein, 15 aa, Artificial Sequence
  Description of Artificial Sequence: Synthetic peptide
  Seed: SIGKVCRTLLAKSVF
SIYKVNRKLLMKSVF

SEQ ID NO: 275989 - protein, 15 aa, Artificial Sequence
  Description of Artificial Sequence: Synthetic peptide
  Seed: SIGKVCRTLLAKSVF
SIYKVNRKLLNKSVF

SEQ ID NO: 275990 - protein, 15 aa, Artificial Sequence
  Description of Artificial Sequence: Synthetic peptide
  Seed: SIGKVCRTLLAKSVF
SIYKVNRKLLPKSVF

SEQ ID NO: 275991 - protein, 15 aa, Artificial Sequence
  Description of Artificial Sequence: Synthetic peptide
  Seed: SIGKVCRTLLAKSVF
SIYKVNRKLLQKSVF

SEQ ID NO: 275992 - protein, 15 aa, Artificial Sequence
  Description of Artificial Sequence: Synthetic peptide
  Seed: SIGKVCRTLLAKSVF
SIYKVNRKLLRKSVF

SEQ ID NO: 275993 - protein, 15 aa, Artificial Sequence
  Description of Artificial Sequence: Synthetic peptide
  Seed: SIGKVCRTLLAKSVF
SIYKVNRKLLSKSVF

SEQ ID NO: 275994 - protein, 15 aa, Artificial Sequence
  Description of Artificial Sequence: Synthetic peptide
  Seed: SIGKVCRTLLAKSVF
SIYKVNRKLLTKSVF

SEQ ID NO: 275995 - protein, 15 aa, Artificial Sequence
  Description of Artificial Sequence: Synthetic peptide
  Seed: SIGKVCRTLLAKSVF
SIYKVNRKLLVKSVF

SEQ ID NO: 275996 - protein, 15 aa, Artificial Sequence
  Description of Artificial Sequence: Synthetic peptide
  Seed: SIGKVCRTLLAKSVF
SIYKVNRKLLYKSVF

SEQ ID NO: 275997 - protein, 15 aa, Artificial Sequence
  Description of Artificial Sequence: Synthetic peptide
  Seed: SIGKVCRTLLAKSVF
SIYKVNRNLLAKSVF

SEQ ID NO: 275998 - protein, 15 aa, Artificial Sequence
  Description of Artificial Sequence: Synthetic peptide
  Seed: SIGKVCRTLLAKSVF
SIYKVNRNLLSKSVF

SEQ ID NO: 275999 - protein, 15 aa, Artificial Sequence
  Description of Artificial Sequence: Synthetic peptide
  Seed: SIGKVCRTLLAKSVF
SIYKVNRPLLAKSVF

SEQ ID NO: 276000 - protein, 15 aa, Artificial Sequence
  Description of Artificial Sequence: Synthetic peptide
  Seed: SIGKVCRTLLAKSVF
SIYKVNRPLLSKSVF

SEQ ID NO: 276001 - protein, 15 aa, Artificial Sequence
  Description of Artificial Sequence: Synthetic peptide
  Seed: SIGKVCRTLLAKSVF
SIYKVNRRLLAKSVF

SEQ ID NO: 276002 - protein, 15 aa, Artificial Sequence
  Description of Artificial Sequence: Synthetic peptide
  Seed: SIGKVCRTLLAKSVF
SIYKVNRRLLCKSVF

SEQ ID NO: 276003 - protein, 15 aa, Artificial Sequence
  Description of Artificial Sequence: Synthetic peptide
  Seed: SIGKVCRTLLAKSVF
SIYKVNRRLLDKSVF

SEQ ID NO: 276004 - protein, 15 aa, Artificial Sequence
  Description of Artificial Sequence: Synthetic peptide
  Seed: SIGKVCRTLLAKSVF
SIYKVNRRLLEKSVF

SEQ ID NO: 276005 - protein, 15 aa, Artificial Sequence
  Description of Artificial Sequence: Synthetic peptide
  Seed: SIGKVCRTLLAKSVF
SIYKVNRRLLGKSVF

SEQ ID NO: 276006 - protein, 15 aa, Artificial Sequence
  Description of Artificial Sequence: Synthetic peptide
  Seed: SIGKVCRTLLAKSVF
SIYKVNRRLLHKSVF

SEQ ID NO: 276007 - protein, 15 aa, Artificial Sequence
  Description of Artificial Sequence: Synthetic peptide
  Seed: SIGKVCRTLLAKSVF
SIYKVNRRLLIKSVF

SEQ ID NO: 276008 - protein, 15 aa, Artificial Sequence
  Description of Artificial Sequence: Synthetic peptide
  Seed: SIGKVCRTLLAKSVF
SIYKVNRRLLKKSVF

SEQ ID NO: 276009 - protein, 15 aa, Artificial Sequence
  Description of Artificial Sequence: Synthetic peptide
  Seed: SIGKVCRTLLAKSVF
SIYKVNRRLLLKSVF

SEQ ID NO: 276010 - protein, 15 aa, Artificial Sequence
  Description of Artificial Sequence: Synthetic peptide
  Seed: SIGKVCRTLLAKSVF
SIYKVNRRLLMKSVF

SEQ ID NO: 276011 - protein, 15 aa, Artificial Sequence
  Description of Artificial Sequence: Synthetic peptide
  Seed: SIGKVCRTLLAKSVF
SIYKVNRRLLNKSVF

SEQ ID NO: 276012 - protein, 15 aa, Artificial Sequence
  Description of Artificial Sequence: Synthetic peptide
  Seed: SIGKVCRTLLAKSVF
SIYKVNRRLLPKSVF

SEQ ID NO: 276013 - protein, 15 aa, Artificial Sequence
  Description of Artificial Sequence: Synthetic peptide
  Seed: SIGKVCRTLLAKSVF
SIYKVNRRLLQKSVF

SEQ ID NO: 276014 - protein, 15 aa, Artificial Sequence
  Description of Artificial Sequence: Synthetic peptide
  Seed: SIGKVCRTLLAKSVF
SIYKVNRRLLRKSVF

SEQ ID NO: 276015 - protein, 15 aa, Artificial Sequence
  Description of Artificial Sequence: Synthetic peptide
  Seed: SIGKVCRTLLAKSVF
SIYKVNRRLLSKSVF

SEQ ID NO: 276016 - protein, 15 aa, Artificial Sequence
  Description of Artificial Sequence: Synthetic peptide
  Seed: SIGKVCRTLLAKSVF
SIYKVNRRLLTKSVF

SEQ ID NO: 276017 - protein, 15 aa, Artificial Sequence
  Description of Artificial Sequence: Synthetic peptide
  Seed: SIGKVCRTLLAKSVF
SIYKVNRRLLVKSVF

SEQ ID NO: 276018 - protein, 15 aa, Artificial Sequence
  Description of Artificial Sequence: Synthetic peptide
  Seed: SIGKVCRTLLAKSVF
SIYKVNRRLLWKSVF

SEQ ID NO: 276019 - protein, 15 aa, Artificial Sequence
  Description of Artificial Sequence: Synthetic peptide
  Seed: SIGKVCRTLLAKSVF
SIYKVNRRLLYKSVF

SEQ ID NO: 276020 - protein, 15 aa, Artificial Sequence
  Description of Artificial Sequence: Synthetic peptide
  Seed: SIGKVCRTLLAKSVF
SIYKVNRSLLAKSVF

SEQ ID NO: 276021 - protein, 15 aa, Artificial Sequence
  Description of Artificial Sequence: Synthetic peptide
  Seed: SIGKVCRTLLAKSVF
SIYKVNRSLLSKSVF

SEQ ID NO: 276022 - protein, 15 aa, Artificial Sequence
  Description of Artificial Sequence: Synthetic peptide
  Seed: SIGKVCRTLLAKSVF
SIYKVNRTLLAKSVF

SEQ ID NO: 276023 - protein, 15 aa, Artificial Sequence
  Description of Artificial Sequence: Synthetic peptide
  Seed: SIGKVCRTLLAKSVF
SIYKVNRTLLRKSVF

SEQ ID NO: 276024 - protein, 15 aa, Artificial Sequence
  Description of Artificial Sequence: Synthetic peptide
  Seed: SIGKVCRTLLAKSVF
SIYKVNRTLLSKSVF

SEQ ID NO: 276025 - protein, 15 aa, Artificial Sequence
  Description of Artificial Sequence: Synthetic peptide
  Seed: SIGKVCRTLLAKSVF
SIYKVPRRLLAKSVF

SEQ ID NO: 276026 - protein, 15 aa, Artificial Sequence
  Description of Artificial Sequence: Synthetic peptide
  Seed: SIGKVCRTLLAKSVF
SIYKVQRALLAKSVF

SEQ ID NO: 276027 - protein, 15 aa, Artificial Sequence
  Description of Artificial Sequence: Synthetic peptide
  Seed: SIGKVCRTLLAKSVF
SIYKVQRALLDKSVF

SEQ ID NO: 276028 - protein, 15 aa, Artificial Sequence
  Description of Artificial Sequence: Synthetic peptide
  Seed: SIGKVCRTLLAKSVF
SIYKVQRALLGKSVF

SEQ ID NO: 276029 - protein, 15 aa, Artificial Sequence
  Description of Artificial Sequence: Synthetic peptide
  Seed: SIGKVCRTLLAKSVF
SIYKVQRALLHKSVF

SEQ ID NO: 276030 - protein, 15 aa, Artificial Sequence
  Description of Artificial Sequence: Synthetic peptide
  Seed: SIGKVCRTLLAKSVF
SIYKVQRALLKKSVF

SEQ ID NO: 276031 - protein, 15 aa, Artificial Sequence
  Description of Artificial Sequence: Synthetic peptide
  Seed: SIGKVCRTLLAKSVF
SIYKVQRALLNKSVF

SEQ ID NO: 276032 - protein, 15 aa, Artificial Sequence
  Description of Artificial Sequence: Synthetic peptide
  Seed: SIGKVCRTLLAKSVF
SIYKVQRALLQKSVF

SEQ ID NO: 276033 - protein, 15 aa, Artificial Sequence
  Description of Artificial Sequence: Synthetic peptide
  Seed: SIGKVCRTLLAKSVF
SIYKVQRALLRKSVF

SEQ ID NO: 276034 - protein, 15 aa, Artificial Sequence
  Description of Artificial Sequence: Synthetic peptide
  Seed: SIGKVCRTLLAKSVF
SIYKVQRALLSKSVF

SEQ ID NO: 276035 - protein, 15 aa, Artificial Sequence
  Description of Artificial Sequence: Synthetic peptide
  Seed: SIGKVCRTLLAKSVF
SIYKVQRALLTKSVF

SEQ ID NO: 276036 - protein, 15 aa, Artificial Sequence
  Description of Artificial Sequence: Synthetic peptide
  Seed: SIGKVCRTLLAKSVF
SIYKVQRDLLAKSVF

SEQ ID NO: 276037 - protein, 15 aa, Artificial Sequence
  Description of Artificial Sequence: Synthetic peptide
  Seed: SIGKVCRTLLAKSVF
SIYKVQRGLLAKSVF

SEQ ID NO: 276038 - protein, 15 aa, Artificial Sequence
  Description of Artificial Sequence: Synthetic peptide
  Seed: SIGKVCRTLLAKSVF
SIYKVQRGLLSKSVF

SEQ ID NO: 276039 - protein, 15 aa, Artificial Sequence
  Description of Artificial Sequence: Synthetic peptide
  Seed: SIGKVCRTLLAKSVF
SIYKVQRHLLAKSVF

SEQ ID NO: 276040 - protein, 15 aa, Artificial Sequence
  Description of Artificial Sequence: Synthetic peptide
  Seed: SIGKVCRTLLAKSVF
SIYKVQRHLLGKSVF

SEQ ID NO: 276041 - protein, 15 aa, Artificial Sequence
  Description of Artificial Sequence: Synthetic peptide
  Seed: SIGKVCRTLLAKSVF
SIYKVQRHLLHKSVF

SEQ ID NO: 276042 - protein, 15 aa, Artificial Sequence
  Description of Artificial Sequence: Synthetic peptide
  Seed: SIGKVCRTLLAKSVF
SIYKVQRHLLMKSVF

SEQ ID NO: 276043 - protein, 15 aa, Artificial Sequence
  Description of Artificial Sequence: Synthetic peptide
  Seed: SIGKVCRTLLAKSVF
SIYKVQRHLLQKSVF

SEQ ID NO: 276044 - protein, 15 aa, Artificial Sequence
  Description of Artificial Sequence: Synthetic peptide
  Seed: SIGKVCRTLLAKSVF
SIYKVQRHLLSKSVF

SEQ ID NO: 276045 - protein, 15 aa, Artificial Sequence
  Description of Artificial Sequence: Synthetic peptide
  Seed: SIGKVCRTLLAKSVF
SIYKVQRHLLTKSVF

SEQ ID NO: 276046 - protein, 15 aa, Artificial Sequence
  Description of Artificial Sequence: Synthetic peptide
  Seed: SIGKVCRTLLAKSVF
SIYKVQRHLLVKSVF

SEQ ID NO: 276047 - protein, 15 aa, Artificial Sequence
  Description of Artificial Sequence: Synthetic peptide
  Seed: SIGKVCRTLLAKSVF
SIYKVQRILLAKSVF

SEQ ID NO: 276048 - protein, 15 aa, Artificial Sequence
  Description of Artificial Sequence: Synthetic peptide
  Seed: SIGKVCRTLLAKSVF
SIYKVQRILLGKSVF

SEQ ID NO: 276049 - protein, 15 aa, Artificial Sequence
  Description of Artificial Sequence: Synthetic peptide
  Seed: SIGKVCRTLLAKSVF
SIYKVQRILLQKSVF

SEQ ID NO: 276050 - protein, 15 aa, Artificial Sequence
  Description of Artificial Sequence: Synthetic peptide
  Seed: SIGKVCRTLLAKSVF
SIYKVQRILLSKSVF

SEQ ID NO: 276051 - protein, 15 aa, Artificial Sequence
  Description of Artificial Sequence: Synthetic peptide
  Seed: SIGKVCRTLLAKSVF
SIYKVQRKLLAKSVF

SEQ ID NO: 276052 - protein, 15 aa, Artificial Sequence
  Description of Artificial Sequence: Synthetic peptide
  Seed: SIGKVCRTLLAKSVF
SIYKVQRKLLCKSVF

SEQ ID NO: 276053 - protein, 15 aa, Artificial Sequence
  Description of Artificial Sequence: Synthetic peptide
  Seed: SIGKVCRTLLAKSVF
SIYKVQRKLLEKSVF

SEQ ID NO: 276054 - protein, 15 aa, Artificial Sequence
  Description of Artificial Sequence: Synthetic peptide
  Seed: SIGKVCRTLLAKSVF
SIYKVQRKLLFKSVF

SEQ ID NO: 276055 - protein, 15 aa, Artificial Sequence
  Description of Artificial Sequence: Synthetic peptide
  Seed: SIGKVCRTLLAKSVF
SIYKVQRKLLGKSVF

SEQ ID NO: 276056 - protein, 15 aa, Artificial Sequence
  Description of Artificial Sequence: Synthetic peptide
  Seed: SIGKVCRTLLAKSVF
SIYKVQRKLLHKSVF

SEQ ID NO: 276057 - protein, 15 aa, Artificial Sequence
  Description of Artificial Sequence: Synthetic peptide
  Seed: SIGKVCRTLLAKSVF
SIYKVQRKLLIKSVF

SEQ ID NO: 276058 - protein, 15 aa, Artificial Sequence
  Description of Artificial Sequence: Synthetic peptide
  Seed: SIGKVCRTLLAKSVF
SIYKVQRKLLKKSVF

SEQ ID NO: 276059 - protein, 15 aa, Artificial Sequence
  Description of Artificial Sequence: Synthetic peptide
  Seed: SIGKVCRTLLAKSVF
SIYKVQRKLLLKSVF

SEQ ID NO: 276060 - protein, 15 aa, Artificial Sequence
  Description of Artificial Sequence: Synthetic peptide
  Seed: SIGKVCRTLLAKSVF
SIYKVQRKLLMKSVF

SEQ ID NO: 276061 - protein, 15 aa, Artificial Sequence
  Description of Artificial Sequence: Synthetic peptide
  Seed: SIGKVCRTLLAKSVF
SIYKVQRKLLNKSVF

SEQ ID NO: 276062 - protein, 15 aa, Artificial Sequence
  Description of Artificial Sequence: Synthetic peptide
  Seed: SIGKVCRTLLAKSVF
SIYKVQRKLLPKSVF

SEQ ID NO: 276063 - protein, 15 aa, Artificial Sequence
  Description of Artificial Sequence: Synthetic peptide
  Seed: SIGKVCRTLLAKSVF
SIYKVQRKLLQKSVF

SEQ ID NO: 276064 - protein, 15 aa, Artificial Sequence
  Description of Artificial Sequence: Synthetic peptide
  Seed: SIGKVCRTLLAKSVF
SIYKVQRKLLRKSVF

SEQ ID NO: 276065 - protein, 15 aa, Artificial Sequence
  Description of Artificial Sequence: Synthetic peptide
  Seed: SIGKVCRTLLAKSVF
SIYKVQRKLLSKSVF

SEQ ID NO: 276066 - protein, 15 aa, Artificial Sequence
  Description of Artificial Sequence: Synthetic peptide
  Seed: SIGKVCRTLLAKSVF
SIYKVQRKLLTKSVF

SEQ ID NO: 276067 - protein, 15 aa, Artificial Sequence
  Description of Artificial Sequence: Synthetic peptide
  Seed: SIGKVCRTLLAKSVF
SIYKVQRKLLVKSVF

SEQ ID NO: 276068 - protein, 15 aa, Artificial Sequence
  Description of Artificial Sequence: Synthetic peptide
  Seed: SIGKVCRTLLAKSVF
SIYKVQRKLLWKSVF

SEQ ID NO: 276069 - protein, 15 aa, Artificial Sequence
  Description of Artificial Sequence: Synthetic peptide
  Seed: SIGKVCRTLLAKSVF
SIYKVQRKLLYKSVF

SEQ ID NO: 276070 - protein, 15 aa, Artificial Sequence
  Description of Artificial Sequence: Synthetic peptide
  Seed: SIGKVCRTLLAKSVF
SIYKVQRNLLAKSVF

SEQ ID NO: 276071 - protein, 15 aa, Artificial Sequence
  Description of Artificial Sequence: Synthetic peptide
  Seed: SIGKVCRTLLAKSVF
SIYKVQRNLLDKSVF

SEQ ID NO: 276072 - protein, 15 aa, Artificial Sequence
  Description of Artificial Sequence: Synthetic peptide
  Seed: SIGKVCRTLLAKSVF
SIYKVQRNLLEKSVF

SEQ ID NO: 276073 - protein, 15 aa, Artificial Sequence
  Description of Artificial Sequence: Synthetic peptide
  Seed: SIGKVCRTLLAKSVF
SIYKVQRNLLGKSVF

SEQ ID NO: 276074 - protein, 15 aa, Artificial Sequence
  Description of Artificial Sequence: Synthetic peptide
  Seed: SIGKVCRTLLAKSVF
SIYKVQRNLLHKSVF

SEQ ID NO: 276075 - protein, 15 aa, Artificial Sequence
  Description of Artificial Sequence: Synthetic peptide
  Seed: SIGKVCRTLLAKSVF
SIYKVQRNLLNKSVF

SEQ ID NO: 276076 - protein, 15 aa, Artificial Sequence
  Description of Artificial Sequence: Synthetic peptide
  Seed: SIGKVCRTLLAKSVF
SIYKVQRNLLQKSVF

SEQ ID NO: 276077 - protein, 15 aa, Artificial Sequence
  Description of Artificial Sequence: Synthetic peptide
  Seed: SIGKVCRTLLAKSVF
SIYKVQRNLLRKSVF

SEQ ID NO: 276078 - protein, 15 aa, Artificial Sequence
  Description of Artificial Sequence: Synthetic peptide
  Seed: SIGKVCRTLLAKSVF
SIYKVQRNLLSKSVF

SEQ ID NO: 276079 - protein, 15 aa, Artificial Sequence
  Description of Artificial Sequence: Synthetic peptide
  Seed: SIGKVCRTLLAKSVF
SIYKVQRNLLTKSVF

SEQ ID NO: 276080 - protein, 15 aa, Artificial Sequence
  Description of Artificial Sequence: Synthetic peptide
  Seed: SIGKVCRTLLAKSVF
SIYKVQRNLLVKSVF

SEQ ID NO: 276081 - protein, 15 aa, Artificial Sequence
  Description of Artificial Sequence: Synthetic peptide
  Seed: SIGKVCRTLLAKSVF
SIYKVQRPLLAKSVF

SEQ ID NO: 276082 - protein, 15 aa, Artificial Sequence
  Description of Artificial Sequence: Synthetic peptide
  Seed: SIGKVCRTLLAKSVF
SIYKVQRPLLGKSVF

SEQ ID NO: 276083 - protein, 15 aa, Artificial Sequence
  Description of Artificial Sequence: Synthetic peptide
  Seed: SIGKVCRTLLAKSVF
SIYKVQRPLLSKSVF

SEQ ID NO: 276084 - protein, 15 aa, Artificial Sequence
  Description of Artificial Sequence: Synthetic peptide
  Seed: SIGKVCRTLLAKSVF
SIYKVQRQLLAKSVF

SEQ ID NO: 276085 - protein, 15 aa, Artificial Sequence
  Description of Artificial Sequence: Synthetic peptide
  Seed: SIGKVCRTLLAKSVF
SIYKVQRQLLSKSVF

SEQ ID NO: 276086 - protein, 15 aa, Artificial Sequence
  Description of Artificial Sequence: Synthetic peptide
  Seed: SIGKVCRTLLAKSVF
SIYKVQRRLLAKSVF

SEQ ID NO: 276087 - protein, 15 aa, Artificial Sequence
  Description of Artificial Sequence: Synthetic peptide
  Seed: SIGKVCRTLLAKSVF
SIYKVQRRLLCKSVF

SEQ ID NO: 276088 - protein, 15 aa, Artificial Sequence
  Description of Artificial Sequence: Synthetic peptide
  Seed: SIGKVCRTLLAKSVF
SIYKVQRRLLDKSVF

SEQ ID NO: 276089 - protein, 15 aa, Artificial Sequence
  Description of Artificial Sequence: Synthetic peptide
  Seed: SIGKVCRTLLAKSVF
SIYKVQRRLLEKSVF

SEQ ID NO: 276090 - protein, 15 aa, Artificial Sequence
  Description of Artificial Sequence: Synthetic peptide
  Seed: SIGKVCRTLLAKSVF
SIYKVQRRLLFKSVF

SEQ ID NO: 276091 - protein, 15 aa, Artificial Sequence
  Description of Artificial Sequence: Synthetic peptide
  Seed: SIGKVCRTLLAKSVF
SIYKVQRRLLGKSVF

SEQ ID NO: 276092 - protein, 15 aa, Artificial Sequence
  Description of Artificial Sequence: Synthetic peptide
  Seed: SIGKVCRTLLAKSVF
SIYKVQRRLLHKSVF

SEQ ID NO: 276093 - protein, 15 aa, Artificial Sequence
  Description of Artificial Sequence: Synthetic peptide
  Seed: SIGKVCRTLLAKSVF
SIYKVQRRLLIKSVF

SEQ ID NO: 276094 - protein, 15 aa, Artificial Sequence
  Description of Artificial Sequence: Synthetic peptide
  Seed: SIGKVCRTLLAKSVF
SIYKVQRRLLKKSVF

SEQ ID NO: 276095 - protein, 15 aa, Artificial Sequence
  Description of Artificial Sequence: Synthetic peptide
  Seed: SIGKVCRTLLAKSVF
SIYKVQRRLLLKSVF

SEQ ID NO: 276096 - protein, 15 aa, Artificial Sequence
  Description of Artificial Sequence: Synthetic peptide
  Seed: SIGKVCRTLLAKSVF
SIYKVQRRLLMKSVF

SEQ ID NO: 276097 - protein, 15 aa, Artificial Sequence
  Description of Artificial Sequence: Synthetic peptide
  Seed: SIGKVCRTLLAKSVF
SIYKVQRRLLNKSVF

SEQ ID NO: 276098 - protein, 15 aa, Artificial Sequence
  Description of Artificial Sequence: Synthetic peptide
  Seed: SIGKVCRTLLAKSVF
SIYKVQRRLLPKSVF

SEQ ID NO: 276099 - protein, 15 aa, Artificial Sequence
  Description of Artificial Sequence: Synthetic peptide
  Seed: SIGKVCRTLLAKSVF
SIYKVQRRLLQKSVF

SEQ ID NO: 276100 - protein, 15 aa, Artificial Sequence
  Description of Artificial Sequence: Synthetic peptide
  Seed: SIGKVCRTLLAKSVF
SIYKVQRRLLRKSVF

SEQ ID NO: 276101 - protein, 15 aa, Artificial Sequence
  Description of Artificial Sequence: Synthetic peptide
  Seed: SIGKVCRTLLAKSVF
SIYKVQRRLLSKSVF

SEQ ID NO: 276102 - protein, 15 aa, Artificial Sequence
  Description of Artificial Sequence: Synthetic peptide
  Seed: SIGKVCRTLLAKSVF
SIYKVQRRLLTKSVF

SEQ ID NO: 276103 - protein, 15 aa, Artificial Sequence
  Description of Artificial Sequence: Synthetic peptide
  Seed: SIGKVCRTLLAKSVF
SIYKVQRRLLVKSVF

SEQ ID NO: 276104 - protein, 15 aa, Artificial Sequence
  Description of Artificial Sequence: Synthetic peptide
  Seed: SIGKVCRTLLAKSVF
SIYKVQRRLLWKSVF

SEQ ID NO: 276105 - protein, 15 aa, Artificial Sequence
  Description of Artificial Sequence: Synthetic peptide
  Seed: SIGKVCRTLLAKSVF
SIYKVQRRLLYKSVF

SEQ ID NO: 276106 - protein, 15 aa, Artificial Sequence
  Description of Artificial Sequence: Synthetic peptide
  Seed: SIGKVCRTLLAKSVF
SIYKVQRSLLAKSVF

SEQ ID NO: 276107 - protein, 15 aa, Artificial Sequence
  Description of Artificial Sequence: Synthetic peptide
  Seed: SIGKVCRTLLAKSVF
SIYKVQRSLLDKSVF

SEQ ID NO: 276108 - protein, 15 aa, Artificial Sequence
  Description of Artificial Sequence: Synthetic peptide
  Seed: SIGKVCRTLLAKSVF
SIYKVQRSLLEKSVF

SEQ ID NO: 276109 - protein, 15 aa, Artificial Sequence
  Description of Artificial Sequence: Synthetic peptide
  Seed: SIGKVCRTLLAKSVF
SIYKVQRSLLGKSVF

SEQ ID NO: 276110 - protein, 15 aa, Artificial Sequence
  Description of Artificial Sequence: Synthetic peptide
  Seed: SIGKVCRTLLAKSVF
SIYKVQRSLLHKSVF

SEQ ID NO: 276111 - protein, 15 aa, Artificial Sequence
  Description of Artificial Sequence: Synthetic peptide
  Seed: SIGKVCRTLLAKSVF
SIYKVQRSLLMKSVF

SEQ ID NO: 276112 - protein, 15 aa, Artificial Sequence
  Description of Artificial Sequence: Synthetic peptide
  Seed: SIGKVCRTLLAKSVF
SIYKVQRSLLNKSVF

SEQ ID NO: 276113 - protein, 15 aa, Artificial Sequence
  Description of Artificial Sequence: Synthetic peptide
  Seed: SIGKVCRTLLAKSVF
SIYKVQRSLLQKSVF

SEQ ID NO: 276114 - protein, 15 aa, Artificial Sequence
  Description of Artificial Sequence: Synthetic peptide
  Seed: SIGKVCRTLLAKSVF
SIYKVQRSLLRKSVF

SEQ ID NO: 276115 - protein, 15 aa, Artificial Sequence
  Description of Artificial Sequence: Synthetic peptide
  Seed: SIGKVCRTLLAKSVF
SIYKVQRSLLSKSVF

SEQ ID NO: 276116 - protein, 15 aa, Artificial Sequence
  Description of Artificial Sequence: Synthetic peptide
  Seed: SIGKVCRTLLAKSVF
SIYKVQRSLLTKSVF

SEQ ID NO: 276117 - protein, 15 aa, Artificial Sequence
  Description of Artificial Sequence: Synthetic peptide
  Seed: SIGKVCRTLLAKSVF
SIYKVQRSLLVKSVF

SEQ ID NO: 276118 - protein, 15 aa, Artificial Sequence
  Description of Artificial Sequence: Synthetic peptide
  Seed: SIGKVCRTLLAKSVF
SIYKVQRTLLAKSVF

SEQ ID NO: 276119 - protein, 15 aa, Artificial Sequence
  Description of Artificial Sequence: Synthetic peptide
  Seed: SIGKVCRTLLAKSVF
SIYKVQRTLLDKSVF

SEQ ID NO: 276120 - protein, 15 aa, Artificial Sequence
  Description of Artificial Sequence: Synthetic peptide
  Seed: SIGKVCRTLLAKSVF
SIYKVQRTLLEKSVF

SEQ ID NO: 276121 - protein, 15 aa, Artificial Sequence
  Description of Artificial Sequence: Synthetic peptide
  Seed: SIGKVCRTLLAKSVF
SIYKVQRTLLGKSVF

SEQ ID NO: 276122 - protein, 15 aa, Artificial Sequence
  Description of Artificial Sequence: Synthetic peptide
  Seed: SIGKVCRTLLAKSVF
SIYKVQRTLLHKSVF

SEQ ID NO: 276123 - protein, 15 aa, Artificial Sequence
  Description of Artificial Sequence: Synthetic peptide
  Seed: SIGKVCRTLLAKSVF
SIYKVQRTLLIKSVF

SEQ ID NO: 276124 - protein, 15 aa, Artificial Sequence
  Description of Artificial Sequence: Synthetic peptide
  Seed: SIGKVCRTLLAKSVF
SIYKVQRTLLKKSVF

SEQ ID NO: 276125 - protein, 15 aa, Artificial Sequence
  Description of Artificial Sequence: Synthetic peptide
  Seed: SIGKVCRTLLAKSVF
SIYKVQRTLLLKSVF

SEQ ID NO: 276126 - protein, 15 aa, Artificial Sequence
  Description of Artificial Sequence: Synthetic peptide
  Seed: SIGKVCRTLLAKSVF
SIYKVQRTLLMKSVF

SEQ ID NO: 276127 - protein, 15 aa, Artificial Sequence
  Description of Artificial Sequence: Synthetic peptide
  Seed: SIGKVCRTLLAKSVF
SIYKVQRTLLNKSVF

SEQ ID NO: 276128 - protein, 15 aa, Artificial Sequence
  Description of Artificial Sequence: Synthetic peptide
  Seed: SIGKVCRTLLAKSVF
SIYKVQRTLLPKSVF

SEQ ID NO: 276129 - protein, 15 aa, Artificial Sequence
  Description of Artificial Sequence: Synthetic peptide
  Seed: SIGKVCRTLLAKSVF
SIYKVQRTLLQKSVF

SEQ ID NO: 276130 - protein, 15 aa, Artificial Sequence
  Description of Artificial Sequence: Synthetic peptide
  Seed: SIGKVCRTLLAKSVF
SIYKVQRTLLRKSVF

SEQ ID NO: 276131 - protein, 15 aa, Artificial Sequence
  Description of Artificial Sequence: Synthetic peptide
  Seed: SIGKVCRTLLAKSVF
SIYKVQRTLLSKSVF

SEQ ID NO: 276132 - protein, 15 aa, Artificial Sequence
  Description of Artificial Sequence: Synthetic peptide
  Seed: SIGKVCRTLLAKSVF
SIYKVQRTLLTKSVF

SEQ ID NO: 276133 - protein, 15 aa, Artificial Sequence
  Description of Artificial Sequence: Synthetic peptide
  Seed: SIGKVCRTLLAKSVF
SIYKVQRTLLVKSVF

SEQ ID NO: 276134 - protein, 15 aa, Artificial Sequence
  Description of Artificial Sequence: Synthetic peptide
  Seed: SIGKVCRTLLAKSVF
SIYKVQRVLLAKSVF

SEQ ID NO: 276135 - protein, 15 aa, Artificial Sequence
  Description of Artificial Sequence: Synthetic peptide
  Seed: SIGKVCRTLLAKSVF
SIYKVQRVLLDKSVF

SEQ ID NO: 276136 - protein, 15 aa, Artificial Sequence
  Description of Artificial Sequence: Synthetic peptide
  Seed: SIGKVCRTLLAKSVF
SIYKVQRVLLGKSVF

SEQ ID NO: 276137 - protein, 15 aa, Artificial Sequence
  Description of Artificial Sequence: Synthetic peptide
  Seed: SIGKVCRTLLAKSVF
SIYKVQRVLLHKSVF

SEQ ID NO: 276138 - protein, 15 aa, Artificial Sequence
  Description of Artificial Sequence: Synthetic peptide
  Seed: SIGKVCRTLLAKSVF
SIYKVQRVLLRKSVF

SEQ ID NO: 276139 - protein, 15 aa, Artificial Sequence
  Description of Artificial Sequence: Synthetic peptide
  Seed: SIGKVCRTLLAKSVF
SIYKVQRVLLSKSVF

SEQ ID NO: 276140 - protein, 15 aa, Artificial Sequence
  Description of Artificial Sequence: Synthetic peptide
  Seed: SIGKVCRTLLAKSVF
SIYKVRRALLAKSVF

SEQ ID NO: 276141 - protein, 15 aa, Artificial Sequence
  Description of Artificial Sequence: Synthetic peptide
  Seed: SIGKVCRTLLAKSVF
SIYKVRRALLGKSVF

SEQ ID NO: 276142 - protein, 15 aa, Artificial Sequence
  Description of Artificial Sequence: Synthetic peptide
  Seed: SIGKVCRTLLAKSVF
SIYKVRRALLHKSVF

SEQ ID NO: 276143 - protein, 15 aa, Artificial Sequence
  Description of Artificial Sequence: Synthetic peptide
  Seed: SIGKVCRTLLAKSVF
SIYKVRRALLKKSVF

SEQ ID NO: 276144 - protein, 15 aa, Artificial Sequence
  Description of Artificial Sequence: Synthetic peptide
  Seed: SIGKVCRTLLAKSVF
SIYKVRRALLMKSVF

SEQ ID NO: 276145 - protein, 15 aa, Artificial Sequence
  Description of Artificial Sequence: Synthetic peptide
  Seed: SIGKVCRTLLAKSVF
SIYKVRRALLNKSVF

SEQ ID NO: 276146 - protein, 15 aa, Artificial Sequence
  Description of Artificial Sequence: Synthetic peptide
  Seed: SIGKVCRTLLAKSVF
SIYKVRRALLQKSVF

SEQ ID NO: 276147 - protein, 15 aa, Artificial Sequence
  Description of Artificial Sequence: Synthetic peptide
  Seed: SIGKVCRTLLAKSVF
SIYKVRRALLRKSVF

SEQ ID NO: 276148 - protein, 15 aa, Artificial Sequence
  Description of Artificial Sequence: Synthetic peptide
  Seed: SIGKVCRTLLAKSVF
SIYKVRRALLSKSVF

SEQ ID NO: 276149 - protein, 15 aa, Artificial Sequence
  Description of Artificial Sequence: Synthetic peptide
  Seed: SIGKVCRTLLAKSVF
SIYKVRRALLTKSVF

SEQ ID NO: 276150 - protein, 15 aa, Artificial Sequence
  Description of Artificial Sequence: Synthetic peptide
  Seed: SIGKVCRTLLAKSVF
SIYKVRRALLVKSVF

SEQ ID NO: 276151 - protein, 15 aa, Artificial Sequence
  Description of Artificial Sequence: Synthetic peptide
  Seed: SIGKVCRTLLAKSVF
SIYKVRRGLLAKSVF

SEQ ID NO: 276152 - protein, 15 aa, Artificial Sequence
  Description of Artificial Sequence: Synthetic peptide
  Seed: SIGKVCRTLLAKSVF
SIYKVRRGLLRKSVF

SEQ ID NO: 276153 - protein, 15 aa, Artificial Sequence
  Description of Artificial Sequence: Synthetic peptide
  Seed: SIGKVCRTLLAKSVF
SIYKVRRGLLSKSVF

SEQ ID NO: 276154 - protein, 15 aa, Artificial Sequence
  Description of Artificial Sequence: Synthetic peptide
  Seed: SIGKVCRTLLAKSVF
SIYKVRRHLLAKSVF

SEQ ID NO: 276155 - protein, 15 aa, Artificial Sequence
  Description of Artificial Sequence: Synthetic peptide
  Seed: SIGKVCRTLLAKSVF
SIYKVRRHLLGKSVF

SEQ ID NO: 276156 - protein, 15 aa, Artificial Sequence
  Description of Artificial Sequence: Synthetic peptide
  Seed: SIGKVCRTLLAKSVF
SIYKVRRHLLSKSVF

SEQ ID NO: 276157 - protein, 15 aa, Artificial Sequence
  Description of Artificial Sequence: Synthetic peptide
  Seed: SIGKVCRTLLAKSVF
SIYKVRRILLAKSVF

SEQ ID NO: 276158 - protein, 15 aa, Artificial Sequence
  Description of Artificial Sequence: Synthetic peptide
  Seed: SIGKVCRTLLAKSVF
SIYKVRRILLKKSVF

SEQ ID NO: 276159 - protein, 15 aa, Artificial Sequence
  Description of Artificial Sequence: Synthetic peptide
  Seed: SIGKVCRTLLAKSVF
SIYKVRRILLRKSVF

SEQ ID NO: 276160 - protein, 15 aa, Artificial Sequence
  Description of Artificial Sequence: Synthetic peptide
  Seed: SIGKVCRTLLAKSVF
SIYKVRRILLSKSVF

SEQ ID NO: 276161 - protein, 15 aa, Artificial Sequence
  Description of Artificial Sequence: Synthetic peptide
  Seed: SIGKVCRTLLAKSVF
SIYKVRRKLLAKSVF

SEQ ID NO: 276162 - protein, 15 aa, Artificial Sequence
  Description of Artificial Sequence: Synthetic peptide
  Seed: SIGKVCRTLLAKSVF
SIYKVRRKLLCKSVF

SEQ ID NO: 276163 - protein, 15 aa, Artificial Sequence
  Description of Artificial Sequence: Synthetic peptide
  Seed: SIGKVCRTLLAKSVF
SIYKVRRKLLDKSVF

SEQ ID NO: 276164 - protein, 15 aa, Artificial Sequence
  Description of Artificial Sequence: Synthetic peptide
  Seed: SIGKVCRTLLAKSVF
SIYKVRRKLLEKSVF

SEQ ID NO: 276165 - protein, 15 aa, Artificial Sequence
  Description of Artificial Sequence: Synthetic peptide
  Seed: SIGKVCRTLLAKSVF
SIYKVRRKLLGKSVF

SEQ ID NO: 276166 - protein, 15 aa, Artificial Sequence
  Description of Artificial Sequence: Synthetic peptide
  Seed: SIGKVCRTLLAKSVF
SIYKVRRKLLHKSVF

SEQ ID NO: 276167 - protein, 15 aa, Artificial Sequence
  Description of Artificial Sequence: Synthetic peptide
  Seed: SIGKVCRTLLAKSVF
SIYKVRRKLLIKSVF

SEQ ID NO: 276168 - protein, 15 aa, Artificial Sequence
  Description of Artificial Sequence: Synthetic peptide
  Seed: SIGKVCRTLLAKSVF
SIYKVRRKLLKKSVF

SEQ ID NO: 276169 - protein, 15 aa, Artificial Sequence
  Description of Artificial Sequence: Synthetic peptide
  Seed: SIGKVCRTLLAKSVF
SIYKVRRKLLLKSVF

SEQ ID NO: 276170 - protein, 15 aa, Artificial Sequence
  Description of Artificial Sequence: Synthetic peptide
  Seed: SIGKVCRTLLAKSVF
SIYKVRRKLLMKSVF

SEQ ID NO: 276171 - protein, 15 aa, Artificial Sequence
  Description of Artificial Sequence: Synthetic peptide
  Seed: SIGKVCRTLLAKSVF
SIYKVRRKLLNKSVF

SEQ ID NO: 276172 - protein, 15 aa, Artificial Sequence
  Description of Artificial Sequence: Synthetic peptide
  Seed: SIGKVCRTLLAKSVF
SIYKVRRKLLPKSVF

SEQ ID NO: 276173 - protein, 15 aa, Artificial Sequence
  Description of Artificial Sequence: Synthetic peptide
  Seed: SIGKVCRTLLAKSVF
SIYKVRRKLLQKSVF

SEQ ID NO: 276174 - protein, 15 aa, Artificial Sequence
  Description of Artificial Sequence: Synthetic peptide
  Seed: SIGKVCRTLLAKSVF
SIYKVRRKLLRKSVF

SEQ ID NO: 276175 - protein, 15 aa, Artificial Sequence
  Description of Artificial Sequence: Synthetic peptide
  Seed: SIGKVCRTLLAKSVF
SIYKVRRKLLSKSVF

SEQ ID NO: 276176 - protein, 15 aa, Artificial Sequence
  Description of Artificial Sequence: Synthetic peptide
  Seed: SIGKVCRTLLAKSVF
SIYKVRRKLLTKSVF

SEQ ID NO: 276177 - protein, 15 aa, Artificial Sequence
  Description of Artificial Sequence: Synthetic peptide
  Seed: SIGKVCRTLLAKSVF
SIYKVRRKLLVKSVF

SEQ ID NO: 276178 - protein, 15 aa, Artificial Sequence
  Description of Artificial Sequence: Synthetic peptide
  Seed: SIGKVCRTLLAKSVF
SIYKVRRKLLYKSVF

SEQ ID NO: 276179 - protein, 15 aa, Artificial Sequence
  Description of Artificial Sequence: Synthetic peptide
  Seed: SIGKVCRTLLAKSVF
SIYKVRRLLLSKSVF

SEQ ID NO: 276180 - protein, 15 aa, Artificial Sequence
  Description of Artificial Sequence: Synthetic peptide
  Seed: SIGKVCRTLLAKSVF
SIYKVRRMLLAKSVF

SEQ ID NO: 276181 - protein, 15 aa, Artificial Sequence
  Description of Artificial Sequence: Synthetic peptide
  Seed: SIGKVCRTLLAKSVF
SIYKVRRMLLRKSVF

SEQ ID NO: 276182 - protein, 15 aa, Artificial Sequence
  Description of Artificial Sequence: Synthetic peptide
  Seed: SIGKVCRTLLAKSVF
SIYKVRRMLLSKSVF

SEQ ID NO: 276183 - protein, 15 aa, Artificial Sequence
  Description of Artificial Sequence: Synthetic peptide
  Seed: SIGKVCRTLLAKSVF
SIYKVRRNLLAKSVF

SEQ ID NO: 276184 - protein, 15 aa, Artificial Sequence
  Description of Artificial Sequence: Synthetic peptide
  Seed: SIGKVCRTLLAKSVF
SIYKVRRNLLGKSVF

SEQ ID NO: 276185 - protein, 15 aa, Artificial Sequence
  Description of Artificial Sequence: Synthetic peptide
  Seed: SIGKVCRTLLAKSVF
SIYKVRRNLLQKSVF

SEQ ID NO: 276186 - protein, 15 aa, Artificial Sequence
  Description of Artificial Sequence: Synthetic peptide
  Seed: SIGKVCRTLLAKSVF
SIYKVRRNLLSKSVF

SEQ ID NO: 276187 - protein, 15 aa, Artificial Sequence
  Description of Artificial Sequence: Synthetic peptide
  Seed: SIGKVCRTLLAKSVF
SIYKVRRPLLAKSVF

SEQ ID NO: 276188 - protein, 15 aa, Artificial Sequence
  Description of Artificial Sequence: Synthetic peptide
  Seed: SIGKVCRTLLAKSVF
SIYKVRRPLLRKSVF

SEQ ID NO: 276189 - protein, 15 aa, Artificial Sequence
  Description of Artificial Sequence: Synthetic peptide
  Seed: SIGKVCRTLLAKSVF
SIYKVRRPLLSKSVF

SEQ ID NO: 276190 - protein, 15 aa, Artificial Sequence
  Description of Artificial Sequence: Synthetic peptide
  Seed: SIGKVCRTLLAKSVF
SIYKVRRQLLGKSVF

SEQ ID NO: 276191 - protein, 15 aa, Artificial Sequence
  Description of Artificial Sequence: Synthetic peptide
  Seed: SIGKVCRTLLAKSVF
SIYKVRRQLLQKSVF

SEQ ID NO: 276192 - protein, 15 aa, Artificial Sequence
  Description of Artificial Sequence: Synthetic peptide
  Seed: SIGKVCRTLLAKSVF
SIYKVRRRLLAKSVF

SEQ ID NO: 276193 - protein, 15 aa, Artificial Sequence
  Description of Artificial Sequence: Synthetic peptide
  Seed: SIGKVCRTLLAKSVF
SIYKVRRRLLCKSVF

SEQ ID NO: 276194 - protein, 15 aa, Artificial Sequence
  Description of Artificial Sequence: Synthetic peptide
  Seed: SIGKVCRTLLAKSVF
SIYKVRRRLLDKSVF

SEQ ID NO: 276195 - protein, 15 aa, Artificial Sequence
  Description of Artificial Sequence: Synthetic peptide
  Seed: SIGKVCRTLLAKSVF
SIYKVRRRLLEKSVF

SEQ ID NO: 276196 - protein, 15 aa, Artificial Sequence
  Description of Artificial Sequence: Synthetic peptide
  Seed: SIGKVCRTLLAKSVF
SIYKVRRRLLGKSVF

SEQ ID NO: 276197 - protein, 15 aa, Artificial Sequence
  Description of Artificial Sequence: Synthetic peptide
  Seed: SIGKVCRTLLAKSVF
SIYKVRRRLLHKSVF

SEQ ID NO: 276198 - protein, 15 aa, Artificial Sequence
  Description of Artificial Sequence: Synthetic peptide
  Seed: SIGKVCRTLLAKSVF
SIYKVRRRLLIKSVF

SEQ ID NO: 276199 - protein, 15 aa, Artificial Sequence
  Description of Artificial Sequence: Synthetic peptide
  Seed: SIGKVCRTLLAKSVF
SIYKVRRRLLKKSVF

SEQ ID NO: 276200 - protein, 15 aa, Artificial Sequence
  Description of Artificial Sequence: Synthetic peptide
  Seed: SIGKVCRTLLAKSVF
SIYKVRRRLLLKSVF

SEQ ID NO: 276201 - protein, 15 aa, Artificial Sequence
  Description of Artificial Sequence: Synthetic peptide
  Seed: SIGKVCRTLLAKSVF
SIYKVRRRLLMKSVF

SEQ ID NO: 276202 - protein, 15 aa, Artificial Sequence
  Description of Artificial Sequence: Synthetic peptide
  Seed: SIGKVCRTLLAKSVF
SIYKVRRRLLNKSVF

SEQ ID NO: 276203 - protein, 15 aa, Artificial Sequence
  Description of Artificial Sequence: Synthetic peptide
  Seed: SIGKVCRTLLAKSVF
SIYKVRRRLLPKSVF

SEQ ID NO: 276204 - protein, 15 aa, Artificial Sequence
  Description of Artificial Sequence: Synthetic peptide
  Seed: SIGKVCRTLLAKSVF
SIYKVRRRLLQKSVF

SEQ ID NO: 276205 - protein, 15 aa, Artificial Sequence
  Description of Artificial Sequence: Synthetic peptide
  Seed: SIGKVCRTLLAKSVF
SIYKVRRRLLRKSVF

SEQ ID NO: 276206 - protein, 15 aa, Artificial Sequence
  Description of Artificial Sequence: Synthetic peptide
  Seed: SIGKVCRTLLAKSVF
SIYKVRRRLLSKSVF

SEQ ID NO: 276207 - protein, 15 aa, Artificial Sequence
  Description of Artificial Sequence: Synthetic peptide
  Seed: SIGKVCRTLLAKSVF
SIYKVRRRLLTKSVF

SEQ ID NO: 276208 - protein, 15 aa, Artificial Sequence
  Description of Artificial Sequence: Synthetic peptide
  Seed: SIGKVCRTLLAKSVF
SIYKVRRRLLVKSVF

SEQ ID NO: 276209 - protein, 15 aa, Artificial Sequence
  Description of Artificial Sequence: Synthetic peptide
  Seed: SIGKVCRTLLAKSVF
SIYKVRRRLLYKSVF

SEQ ID NO: 276210 - protein, 15 aa, Artificial Sequence
  Description of Artificial Sequence: Synthetic peptide
  Seed: SIGKVCRTLLAKSVF
SIYKVRRSLLAKSVF

SEQ ID NO: 276211 - protein, 15 aa, Artificial Sequence
  Description of Artificial Sequence: Synthetic peptide
  Seed: SIGKVCRTLLAKSVF
SIYKVRRSLLGKSVF

SEQ ID NO: 276212 - protein, 15 aa, Artificial Sequence
  Description of Artificial Sequence: Synthetic peptide
  Seed: SIGKVCRTLLAKSVF
SIYKVRRSLLHKSVF

SEQ ID NO: 276213 - protein, 15 aa, Artificial Sequence
  Description of Artificial Sequence: Synthetic peptide
  Seed: SIGKVCRTLLAKSVF
SIYKVRRSLLKKSVF

SEQ ID NO: 276214 - protein, 15 aa, Artificial Sequence
  Description of Artificial Sequence: Synthetic peptide
  Seed: SIGKVCRTLLAKSVF
SIYKVRRSLLNKSVF

SEQ ID NO: 276215 - protein, 15 aa, Artificial Sequence
  Description of Artificial Sequence: Synthetic peptide
  Seed: SIGKVCRTLLAKSVF
SIYKVRRSLLQKSVF

SEQ ID NO: 276216 - protein, 15 aa, Artificial Sequence
  Description of Artificial Sequence: Synthetic peptide
  Seed: SIGKVCRTLLAKSVF
SIYKVRRSLLRKSVF

SEQ ID NO: 276217 - protein, 15 aa, Artificial Sequence
  Description of Artificial Sequence: Synthetic peptide
  Seed: SIGKVCRTLLAKSVF
SIYKVRRSLLSKSVF

SEQ ID NO: 276218 - protein, 15 aa, Artificial Sequence
  Description of Artificial Sequence: Synthetic peptide
  Seed: SIGKVCRTLLAKSVF
SIYKVRRSLLTKSVF

SEQ ID NO: 276219 - protein, 15 aa, Artificial Sequence
  Description of Artificial Sequence: Synthetic peptide
  Seed: SIGKVCRTLLAKSVF
SIYKVRRTLLAKSVF

SEQ ID NO: 276220 - protein, 15 aa, Artificial Sequence
  Description of Artificial Sequence: Synthetic peptide
  Seed: SIGKVCRTLLAKSVF
SIYKVRRTLLEKSVF

SEQ ID NO: 276221 - protein, 15 aa, Artificial Sequence
  Description of Artificial Sequence: Synthetic peptide
  Seed: SIGKVCRTLLAKSVF
SIYKVRRTLLGKSVF

SEQ ID NO: 276222 - protein, 15 aa, Artificial Sequence
  Description of Artificial Sequence: Synthetic peptide
  Seed: SIGKVCRTLLAKSVF
SIYKVRRTLLHKSVF

SEQ ID NO: 276223 - protein, 15 aa, Artificial Sequence
  Description of Artificial Sequence: Synthetic peptide
  Seed: SIGKVCRTLLAKSVF
SIYKVRRTLLKKSVF

SEQ ID NO: 276224 - protein, 15 aa, Artificial Sequence
  Description of Artificial Sequence: Synthetic peptide
  Seed: SIGKVCRTLLAKSVF
SIYKVRRTLLMKSVF

SEQ ID NO: 276225 - protein, 15 aa, Artificial Sequence
  Description of Artificial Sequence: Synthetic peptide
  Seed: SIGKVCRTLLAKSVF
SIYKVRRTLLQKSVF

SEQ ID NO: 276226 - protein, 15 aa, Artificial Sequence
  Description of Artificial Sequence: Synthetic peptide
  Seed: SIGKVCRTLLAKSVF
SIYKVRRTLLRKSVF

SEQ ID NO: 276227 - protein, 15 aa, Artificial Sequence
  Description of Artificial Sequence: Synthetic peptide
  Seed: SIGKVCRTLLAKSVF
SIYKVRRTLLSKSVF

SEQ ID NO: 276228 - protein, 15 aa, Artificial Sequence
  Description of Artificial Sequence: Synthetic peptide
  Seed: SIGKVCRTLLAKSVF
SIYKVRRTLLVKSVF

SEQ ID NO: 276229 - protein, 15 aa, Artificial Sequence
  Description of Artificial Sequence: Synthetic peptide
  Seed: SIGKVCRTLLAKSVF
SIYKVRRTLLYKSVF

SEQ ID NO: 276230 - protein, 15 aa, Artificial Sequence
  Description of Artificial Sequence: Synthetic peptide
  Seed: SIGKVCRTLLAKSVF
SIYKVRRVLLAKSVF

SEQ ID NO: 276231 - protein, 15 aa, Artificial Sequence
  Description of Artificial Sequence: Synthetic peptide
  Seed: SIGKVCRTLLAKSVF
SIYKVRRVLLGKSVF

SEQ ID NO: 276232 - protein, 15 aa, Artificial Sequence
  Description of Artificial Sequence: Synthetic peptide
  Seed: SIGKVCRTLLAKSVF
SIYKVRRVLLHKSVF

SEQ ID NO: 276233 - protein, 15 aa, Artificial Sequence
  Description of Artificial Sequence: Synthetic peptide
  Seed: SIGKVCRTLLAKSVF
SIYKVRRVLLKKSVF

SEQ ID NO: 276234 - protein, 15 aa, Artificial Sequence
  Description of Artificial Sequence: Synthetic peptide
  Seed: SIGKVCRTLLAKSVF
SIYKVRRVLLQKSVF

SEQ ID NO: 276235 - protein, 15 aa, Artificial Sequence
  Description of Artificial Sequence: Synthetic peptide
  Seed: SIGKVCRTLLAKSVF
SIYKVRRVLLRKSVF

SEQ ID NO: 276236 - protein, 15 aa, Artificial Sequence
  Description of Artificial Sequence: Synthetic peptide
  Seed: SIGKVCRTLLAKSVF
SIYKVRRVLLSKSVF

SEQ ID NO: 276237 - protein, 15 aa, Artificial Sequence
  Description of Artificial Sequence: Synthetic peptide
  Seed: SIGKVCRTLLAKSVF
SIYKVSRALLAKSVF

SEQ ID NO: 276238 - protein, 15 aa, Artificial Sequence
  Description of Artificial Sequence: Synthetic peptide
  Seed: SIGKVCRTLLAKSVF
SIYKVSRALLDKSVF

SEQ ID NO: 276239 - protein, 15 aa, Artificial Sequence
  Description of Artificial Sequence: Synthetic peptide
  Seed: SIGKVCRTLLAKSVF
SIYKVSRALLGKSVF

SEQ ID NO: 276240 - protein, 15 aa, Artificial Sequence
  Description of Artificial Sequence: Synthetic peptide
  Seed: SIGKVCRTLLAKSVF
SIYKVSRALLHKSVF

SEQ ID NO: 276241 - protein, 15 aa, Artificial Sequence
  Description of Artificial Sequence: Synthetic peptide
  Seed: SIGKVCRTLLAKSVF
SIYKVSRALLKKSVF

SEQ ID NO: 276242 - protein, 15 aa, Artificial Sequence
  Description of Artificial Sequence: Synthetic peptide
  Seed: SIGKVCRTLLAKSVF
SIYKVSRALLNKSVF

SEQ ID NO: 276243 - protein, 15 aa, Artificial Sequence
  Description of Artificial Sequence: Synthetic peptide
  Seed: SIGKVCRTLLAKSVF
SIYKVSRALLQKSVF

SEQ ID NO: 276244 - protein, 15 aa, Artificial Sequence
  Description of Artificial Sequence: Synthetic peptide
  Seed: SIGKVCRTLLAKSVF
SIYKVSRALLRKSVF

SEQ ID NO: 276245 - protein, 15 aa, Artificial Sequence
  Description of Artificial Sequence: Synthetic peptide
  Seed: SIGKVCRTLLAKSVF
SIYKVSRALLSKSVF

SEQ ID NO: 276246 - protein, 15 aa, Artificial Sequence
  Description of Artificial Sequence: Synthetic peptide
  Seed: SIGKVCRTLLAKSVF
SIYKVSRALLTKSVF

SEQ ID NO: 276247 - protein, 15 aa, Artificial Sequence
  Description of Artificial Sequence: Synthetic peptide
  Seed: SIGKVCRTLLAKSVF
SIYKVSRALLVKSVF

SEQ ID NO: 276248 - protein, 15 aa, Artificial Sequence
  Description of Artificial Sequence: Synthetic peptide
  Seed: SIGKVCRTLLAKSVF
SIYKVSRGLLAKSVF

SEQ ID NO: 276249 - protein, 15 aa, Artificial Sequence
  Description of Artificial Sequence: Synthetic peptide
  Seed: SIGKVCRTLLAKSVF
SIYKVSRGLLGKSVF

SEQ ID NO: 276250 - protein, 15 aa, Artificial Sequence
  Description of Artificial Sequence: Synthetic peptide
  Seed: SIGKVCRTLLAKSVF
SIYKVSRGLLSKSVF

SEQ ID NO: 276251 - protein, 15 aa, Artificial Sequence
  Description of Artificial Sequence: Synthetic peptide
  Seed: SIGKVCRTLLAKSVF
SIYKVSRHLLAKSVF

SEQ ID NO: 276252 - protein, 15 aa, Artificial Sequence
  Description of Artificial Sequence: Synthetic peptide
  Seed: SIGKVCRTLLAKSVF
SIYKVSRHLLGKSVF

SEQ ID NO: 276253 - protein, 15 aa, Artificial Sequence
  Description of Artificial Sequence: Synthetic peptide
  Seed: SIGKVCRTLLAKSVF
SIYKVSRHLLHKSVF

SEQ ID NO: 276254 - protein, 15 aa, Artificial Sequence
  Description of Artificial Sequence: Synthetic peptide
  Seed: SIGKVCRTLLAKSVF
SIYKVSRHLLNKSVF

SEQ ID NO: 276255 - protein, 15 aa, Artificial Sequence
  Description of Artificial Sequence: Synthetic peptide
  Seed: SIGKVCRTLLAKSVF
SIYKVSRHLLQKSVF

SEQ ID NO: 276256 - protein, 15 aa, Artificial Sequence
  Description of Artificial Sequence: Synthetic peptide
  Seed: SIGKVCRTLLAKSVF
SIYKVSRHLLSKSVF

SEQ ID NO: 276257 - protein, 15 aa, Artificial Sequence
  Description of Artificial Sequence: Synthetic peptide
  Seed: SIGKVCRTLLAKSVF
SIYKVSRHLLTKSVF

SEQ ID NO: 276258 - protein, 15 aa, Artificial Sequence
  Description of Artificial Sequence: Synthetic peptide
  Seed: SIGKVCRTLLAKSVF
SIYKVSRKLLAKSVF

SEQ ID NO: 276259 - protein, 15 aa, Artificial Sequence
  Description of Artificial Sequence: Synthetic peptide
  Seed: SIGKVCRTLLAKSVF
SIYKVSRKLLCKSVF

SEQ ID NO: 276260 - protein, 15 aa, Artificial Sequence
  Description of Artificial Sequence: Synthetic peptide
  Seed: SIGKVCRTLLAKSVF
SIYKVSRKLLDKSVF

SEQ ID NO: 276261 - protein, 15 aa, Artificial Sequence
  Description of Artificial Sequence: Synthetic peptide
  Seed: SIGKVCRTLLAKSVF
SIYKVSRKLLEKSVF

SEQ ID NO: 276262 - protein, 15 aa, Artificial Sequence
  Description of Artificial Sequence: Synthetic peptide
  Seed: SIGKVCRTLLAKSVF
SIYKVSRKLLFKSVF

SEQ ID NO: 276263 - protein, 15 aa, Artificial Sequence
  Description of Artificial Sequence: Synthetic peptide
  Seed: SIGKVCRTLLAKSVF
SIYKVSRKLLGKSVF

SEQ ID NO: 276264 - protein, 15 aa, Artificial Sequence
  Description of Artificial Sequence: Synthetic peptide
  Seed: SIGKVCRTLLAKSVF
SIYKVSRKLLHKSVF

SEQ ID NO: 276265 - protein, 15 aa, Artificial Sequence
  Description of Artificial Sequence: Synthetic peptide
  Seed: SIGKVCRTLLAKSVF
SIYKVSRKLLIKSVF

SEQ ID NO: 276266 - protein, 15 aa, Artificial Sequence
  Description of Artificial Sequence: Synthetic peptide
  Seed: SIGKVCRTLLAKSVF
SIYKVSRKLLKKSVF

SEQ ID NO: 276267 - protein, 15 aa, Artificial Sequence
  Description of Artificial Sequence: Synthetic peptide
  Seed: SIGKVCRTLLAKSVF
SIYKVSRKLLLKSVF

SEQ ID NO: 276268 - protein, 15 aa, Artificial Sequence
  Description of Artificial Sequence: Synthetic peptide
  Seed: SIGKVCRTLLAKSVF
SIYKVSRKLLMKSVF

SEQ ID NO: 276269 - protein, 15 aa, Artificial Sequence
  Description of Artificial Sequence: Synthetic peptide
  Seed: SIGKVCRTLLAKSVF
SIYKVSRKLLNKSVF

SEQ ID NO: 276270 - protein, 15 aa, Artificial Sequence
  Description of Artificial Sequence: Synthetic peptide
  Seed: SIGKVCRTLLAKSVF
SIYKVSRKLLPKSVF

SEQ ID NO: 276271 - protein, 15 aa, Artificial Sequence
  Description of Artificial Sequence: Synthetic peptide
  Seed: SIGKVCRTLLAKSVF
SIYKVSRKLLQKSVF

SEQ ID NO: 276272 - protein, 15 aa, Artificial Sequence
  Description of Artificial Sequence: Synthetic peptide
  Seed: SIGKVCRTLLAKSVF
SIYKVSRKLLRKSVF

SEQ ID NO: 276273 - protein, 15 aa, Artificial Sequence
  Description of Artificial Sequence: Synthetic peptide
  Seed: SIGKVCRTLLAKSVF
SIYKVSRKLLSKSVF

SEQ ID NO: 276274 - protein, 15 aa, Artificial Sequence
  Description of Artificial Sequence: Synthetic peptide
  Seed: SIGKVCRTLLAKSVF
SIYKVSRKLLTKSVF

SEQ ID NO: 276275 - protein, 15 aa, Artificial Sequence
  Description of Artificial Sequence: Synthetic peptide
  Seed: SIGKVCRTLLAKSVF
SIYKVSRKLLVKSVF

SEQ ID NO: 276276 - protein, 15 aa, Artificial Sequence
  Description of Artificial Sequence: Synthetic peptide
  Seed: SIGKVCRTLLAKSVF
SIYKVSRKLLWKSVF

SEQ ID NO: 276277 - protein, 15 aa, Artificial Sequence
  Description of Artificial Sequence: Synthetic peptide
  Seed: SIGKVCRTLLAKSVF
SIYKVSRKLLYKSVF

SEQ ID NO: 276278 - protein, 15 aa, Artificial Sequence
  Description of Artificial Sequence: Synthetic peptide
  Seed: SIGKVCRTLLAKSVF
SIYKVSRNLLAKSVF

SEQ ID NO: 276279 - protein, 15 aa, Artificial Sequence
  Description of Artificial Sequence: Synthetic peptide
  Seed: SIGKVCRTLLAKSVF
SIYKVSRNLLDKSVF

SEQ ID NO: 276280 - protein, 15 aa, Artificial Sequence
  Description of Artificial Sequence: Synthetic peptide
  Seed: SIGKVCRTLLAKSVF
SIYKVSRNLLEKSVF

SEQ ID NO: 276281 - protein, 15 aa, Artificial Sequence
  Description of Artificial Sequence: Synthetic peptide
  Seed: SIGKVCRTLLAKSVF
SIYKVSRNLLGKSVF

SEQ ID NO: 276282 - protein, 15 aa, Artificial Sequence
  Description of Artificial Sequence: Synthetic peptide
  Seed: SIGKVCRTLLAKSVF
SIYKVSRNLLHKSVF

SEQ ID NO: 276283 - protein, 15 aa, Artificial Sequence
  Description of Artificial Sequence: Synthetic peptide
  Seed: SIGKVCRTLLAKSVF
SIYKVSRNLLNKSVF

SEQ ID NO: 276284 - protein, 15 aa, Artificial Sequence
  Description of Artificial Sequence: Synthetic peptide
  Seed: SIGKVCRTLLAKSVF
SIYKVSRNLLQKSVF

SEQ ID NO: 276285 - protein, 15 aa, Artificial Sequence
  Description of Artificial Sequence: Synthetic peptide
  Seed: SIGKVCRTLLAKSVF
SIYKVSRNLLSKSVF

SEQ ID NO: 276286 - protein, 15 aa, Artificial Sequence
  Description of Artificial Sequence: Synthetic peptide
  Seed: SIGKVCRTLLAKSVF
SIYKVSRNLLTKSVF

SEQ ID NO: 276287 - protein, 15 aa, Artificial Sequence
  Description of Artificial Sequence: Synthetic peptide
  Seed: SIGKVCRTLLAKSVF
SIYKVSRPLLAKSVF

SEQ ID NO: 276288 - protein, 15 aa, Artificial Sequence
  Description of Artificial Sequence: Synthetic peptide
  Seed: SIGKVCRTLLAKSVF
SIYKVSRPLLGKSVF

SEQ ID NO: 276289 - protein, 15 aa, Artificial Sequence
  Description of Artificial Sequence: Synthetic peptide
  Seed: SIGKVCRTLLAKSVF
SIYKVSRPLLHKSVF

SEQ ID NO: 276290 - protein, 15 aa, Artificial Sequence
  Description of Artificial Sequence: Synthetic peptide
  Seed: SIGKVCRTLLAKSVF
SIYKVSRPLLKKSVF

SEQ ID NO: 276291 - protein, 15 aa, Artificial Sequence
  Description of Artificial Sequence: Synthetic peptide
  Seed: SIGKVCRTLLAKSVF
SIYKVSRPLLNKSVF

SEQ ID NO: 276292 - protein, 15 aa, Artificial Sequence
  Description of Artificial Sequence: Synthetic peptide
  Seed: SIGKVCRTLLAKSVF
SIYKVSRPLLQKSVF

SEQ ID NO: 276293 - protein, 15 aa, Artificial Sequence
  Description of Artificial Sequence: Synthetic peptide
  Seed: SIGKVCRTLLAKSVF
SIYKVSRPLLRKSVF

SEQ ID NO: 276294 - protein, 15 aa, Artificial Sequence
  Description of Artificial Sequence: Synthetic peptide
  Seed: SIGKVCRTLLAKSVF
SIYKVSRPLLSKSVF

SEQ ID NO: 276295 - protein, 15 aa, Artificial Sequence
  Description of Artificial Sequence: Synthetic peptide
  Seed: SIGKVCRTLLAKSVF
SIYKVSRPLLTKSVF

SEQ ID NO: 276296 - protein, 15 aa, Artificial Sequence
  Description of Artificial Sequence: Synthetic peptide
  Seed: SIGKVCRTLLAKSVF
SIYKVSRPLLVKSVF

SEQ ID NO: 276297 - protein, 15 aa, Artificial Sequence
  Description of Artificial Sequence: Synthetic peptide
  Seed: SIGKVCRTLLAKSVF
SIYKVSRQLLAKSVF

SEQ ID NO: 276298 - protein, 15 aa, Artificial Sequence
  Description of Artificial Sequence: Synthetic peptide
  Seed: SIGKVCRTLLAKSVF
SIYKVSRQLLGKSVF

SEQ ID NO: 276299 - protein, 15 aa, Artificial Sequence
  Description of Artificial Sequence: Synthetic peptide
  Seed: SIGKVCRTLLAKSVF
SIYKVSRQLLSKSVF

SEQ ID NO: 276300 - protein, 15 aa, Artificial Sequence
  Description of Artificial Sequence: Synthetic peptide
  Seed: SIGKVCRTLLAKSVF
SIYKVSRRLLAKSVF

SEQ ID NO: 276301 - protein, 15 aa, Artificial Sequence
  Description of Artificial Sequence: Synthetic peptide
  Seed: SIGKVCRTLLAKSVF
SIYKVSRRLLCKSVF

SEQ ID NO: 276302 - protein, 15 aa, Artificial Sequence
  Description of Artificial Sequence: Synthetic peptide
  Seed: SIGKVCRTLLAKSVF
SIYKVSRRLLDKSVF

SEQ ID NO: 276303 - protein, 15 aa, Artificial Sequence
  Description of Artificial Sequence: Synthetic peptide
  Seed: SIGKVCRTLLAKSVF
SIYKVSRRLLEKSVF

SEQ ID NO: 276304 - protein, 15 aa, Artificial Sequence
  Description of Artificial Sequence: Synthetic peptide
  Seed: SIGKVCRTLLAKSVF
SIYKVSRRLLFKSVF

SEQ ID NO: 276305 - protein, 15 aa, Artificial Sequence
  Description of Artificial Sequence: Synthetic peptide
  Seed: SIGKVCRTLLAKSVF
SIYKVSRRLLGKSVF

SEQ ID NO: 276306 - protein, 15 aa, Artificial Sequence
  Description of Artificial Sequence: Synthetic peptide
  Seed: SIGKVCRTLLAKSVF
SIYKVSRRLLHKSVF

SEQ ID NO: 276307 - protein, 15 aa, Artificial Sequence
  Description of Artificial Sequence: Synthetic peptide
  Seed: SIGKVCRTLLAKSVF
SIYKVSRRLLIKSVF

SEQ ID NO: 276308 - protein, 15 aa, Artificial Sequence
  Description of Artificial Sequence: Synthetic peptide
  Seed: SIGKVCRTLLAKSVF
SIYKVSRRLLKKSVF

SEQ ID NO: 276309 - protein, 15 aa, Artificial Sequence
  Description of Artificial Sequence: Synthetic peptide
  Seed: SIGKVCRTLLAKSVF
SIYKVSRRLLLKSVF

SEQ ID NO: 276310 - protein, 15 aa, Artificial Sequence
  Description of Artificial Sequence: Synthetic peptide
  Seed: SIGKVCRTLLAKSVF
SIYKVSRRLLMKSVF

SEQ ID NO: 276311 - protein, 15 aa, Artificial Sequence
  Description of Artificial Sequence: Synthetic peptide
  Seed: SIGKVCRTLLAKSVF
SIYKVSRRLLNKSVF

SEQ ID NO: 276312 - protein, 15 aa, Artificial Sequence
  Description of Artificial Sequence: Synthetic peptide
  Seed: SIGKVCRTLLAKSVF
SIYKVSRRLLPKSVF

SEQ ID NO: 276313 - protein, 15 aa, Artificial Sequence
  Description of Artificial Sequence: Synthetic peptide
  Seed: SIGKVCRTLLAKSVF
SIYKVSRRLLQKSVF

SEQ ID NO: 276314 - protein, 15 aa, Artificial Sequence
  Description of Artificial Sequence: Synthetic peptide
  Seed: SIGKVCRTLLAKSVF
SIYKVSRRLLRKSVF

SEQ ID NO: 276315 - protein, 15 aa, Artificial Sequence
  Description of Artificial Sequence: Synthetic peptide
  Seed: SIGKVCRTLLAKSVF
SIYKVSRRLLSKSVF

SEQ ID NO: 276316 - protein, 15 aa, Artificial Sequence
  Description of Artificial Sequence: Synthetic peptide
  Seed: SIGKVCRTLLAKSVF
SIYKVSRRLLTKSVF

SEQ ID NO: 276317 - protein, 15 aa, Artificial Sequence
  Description of Artificial Sequence: Synthetic peptide
  Seed: SIGKVCRTLLAKSVF
SIYKVSRRLLVKSVF

SEQ ID NO: 276318 - protein, 15 aa, Artificial Sequence
  Description of Artificial Sequence: Synthetic peptide
  Seed: SIGKVCRTLLAKSVF
SIYKVSRRLLWKSVF

SEQ ID NO: 276319 - protein, 15 aa, Artificial Sequence
  Description of Artificial Sequence: Synthetic peptide
  Seed: SIGKVCRTLLAKSVF
SIYKVSRRLLYKSVF

SEQ ID NO: 276320 - protein, 15 aa, Artificial Sequence
  Description of Artificial Sequence: Synthetic peptide
  Seed: SIGKVCRTLLAKSVF
SIYKVSRSLLAKSVF

SEQ ID NO: 276321 - protein, 15 aa, Artificial Sequence
  Description of Artificial Sequence: Synthetic peptide
  Seed: SIGKVCRTLLAKSVF
SIYKVSRSLLDKSVF

SEQ ID NO: 276322 - protein, 15 aa, Artificial Sequence
  Description of Artificial Sequence: Synthetic peptide
  Seed: SIGKVCRTLLAKSVF
SIYKVSRSLLEKSVF

SEQ ID NO: 276323 - protein, 15 aa, Artificial Sequence
  Description of Artificial Sequence: Synthetic peptide
  Seed: SIGKVCRTLLAKSVF
SIYKVSRSLLGKSVF

SEQ ID NO: 276324 - protein, 15 aa, Artificial Sequence
  Description of Artificial Sequence: Synthetic peptide
  Seed: SIGKVCRTLLAKSVF
SIYKVSRSLLHKSVF

SEQ ID NO: 276325 - protein, 15 aa, Artificial Sequence
  Description of Artificial Sequence: Synthetic peptide
  Seed: SIGKVCRTLLAKSVF
SIYKVSRSLLKKSVF

SEQ ID NO: 276326 - protein, 15 aa, Artificial Sequence
  Description of Artificial Sequence: Synthetic peptide
  Seed: SIGKVCRTLLAKSVF
SIYKVSRSLLNKSVF

SEQ ID NO: 276327 - protein, 15 aa, Artificial Sequence
  Description of Artificial Sequence: Synthetic peptide
  Seed: SIGKVCRTLLAKSVF
SIYKVSRSLLQKSVF

SEQ ID NO: 276328 - protein, 15 aa, Artificial Sequence
  Description of Artificial Sequence: Synthetic peptide
  Seed: SIGKVCRTLLAKSVF
SIYKVSRSLLRKSVF

SEQ ID NO: 276329 - protein, 15 aa, Artificial Sequence
  Description of Artificial Sequence: Synthetic peptide
  Seed: SIGKVCRTLLAKSVF
SIYKVSRSLLSKSVF

SEQ ID NO: 276330 - protein, 15 aa, Artificial Sequence
  Description of Artificial Sequence: Synthetic peptide
  Seed: SIGKVCRTLLAKSVF
SIYKVSRSLLTKSVF

SEQ ID NO: 276331 - protein, 15 aa, Artificial Sequence
  Description of Artificial Sequence: Synthetic peptide
  Seed: SIGKVCRTLLAKSVF
SIYKVSRSLLVKSVF

SEQ ID NO: 276332 - protein, 15 aa, Artificial Sequence
  Description of Artificial Sequence: Synthetic peptide
  Seed: SIGKVCRTLLAKSVF
SIYKVSRTLLAKSVF

SEQ ID NO: 276333 - protein, 15 aa, Artificial Sequence
  Description of Artificial Sequence: Synthetic peptide
  Seed: SIGKVCRTLLAKSVF
SIYKVSRTLLDKSVF

SEQ ID NO: 276334 - protein, 15 aa, Artificial Sequence
  Description of Artificial Sequence: Synthetic peptide
  Seed: SIGKVCRTLLAKSVF
SIYKVSRTLLEKSVF

SEQ ID NO: 276335 - protein, 15 aa, Artificial Sequence
  Description of Artificial Sequence: Synthetic peptide
  Seed: SIGKVCRTLLAKSVF
SIYKVSRTLLGKSVF

SEQ ID NO: 276336 - protein, 15 aa, Artificial Sequence
  Description of Artificial Sequence: Synthetic peptide
  Seed: SIGKVCRTLLAKSVF
SIYKVSRTLLHKSVF

SEQ ID NO: 276337 - protein, 15 aa, Artificial Sequence
  Description of Artificial Sequence: Synthetic peptide
  Seed: SIGKVCRTLLAKSVF
SIYKVSRTLLKKSVF

SEQ ID NO: 276338 - protein, 15 aa, Artificial Sequence
  Description of Artificial Sequence: Synthetic peptide
  Seed: SIGKVCRTLLAKSVF
SIYKVSRTLLMKSVF

SEQ ID NO: 276339 - protein, 15 aa, Artificial Sequence
  Description of Artificial Sequence: Synthetic peptide
  Seed: SIGKVCRTLLAKSVF
SIYKVSRTLLNKSVF

SEQ ID NO: 276340 - protein, 15 aa, Artificial Sequence
  Description of Artificial Sequence: Synthetic peptide
  Seed: SIGKVCRTLLAKSVF
SIYKVSRTLLQKSVF

SEQ ID NO: 276341 - protein, 15 aa, Artificial Sequence
  Description of Artificial Sequence: Synthetic peptide
  Seed: SIGKVCRTLLAKSVF
SIYKVSRTLLRKSVF

SEQ ID NO: 276342 - protein, 15 aa, Artificial Sequence
  Description of Artificial Sequence: Synthetic peptide
  Seed: SIGKVCRTLLAKSVF
SIYKVSRTLLSKSVF

SEQ ID NO: 276343 - protein, 15 aa, Artificial Sequence
  Description of Artificial Sequence: Synthetic peptide
  Seed: SIGKVCRTLLAKSVF
SIYKVSRTLLTKSVF

SEQ ID NO: 276344 - protein, 15 aa, Artificial Sequence
  Description of Artificial Sequence: Synthetic peptide
  Seed: SIGKVCRTLLAKSVF
SIYKVSRTLLVKSVF

SEQ ID NO: 276345 - protein, 15 aa, Artificial Sequence
  Description of Artificial Sequence: Synthetic peptide
  Seed: SIGKVCRTLLAKSVF
SIYKVSRVLLAKSVF

SEQ ID NO: 276346 - protein, 15 aa, Artificial Sequence
  Description of Artificial Sequence: Synthetic peptide
  Seed: SIGKVCRTLLAKSVF
SIYKVSRVLLDKSVF

SEQ ID NO: 276347 - protein, 15 aa, Artificial Sequence
  Description of Artificial Sequence: Synthetic peptide
  Seed: SIGKVCRTLLAKSVF
SIYKVSRVLLGKSVF

SEQ ID NO: 276348 - protein, 15 aa, Artificial Sequence
  Description of Artificial Sequence: Synthetic peptide
  Seed: SIGKVCRTLLAKSVF
SIYKVSRVLLHKSVF

SEQ ID NO: 276349 - protein, 15 aa, Artificial Sequence
  Description of Artificial Sequence: Synthetic peptide
  Seed: SIGKVCRTLLAKSVF
SIYKVSRVLLKKSVF

SEQ ID NO: 276350 - protein, 15 aa, Artificial Sequence
  Description of Artificial Sequence: Synthetic peptide
  Seed: SIGKVCRTLLAKSVF
SIYKVSRVLLSKSVF

SEQ ID NO: 276351 - protein, 15 aa, Artificial Sequence
  Description of Artificial Sequence: Synthetic peptide
  Seed: SIGKVCRTLLAKSVF
SIYKVTRALLAKSVF

SEQ ID NO: 276352 - protein, 15 aa, Artificial Sequence
  Description of Artificial Sequence: Synthetic peptide
  Seed: SIGKVCRTLLAKSVF
SIYKVTRALLDKSVF

SEQ ID NO: 276353 - protein, 15 aa, Artificial Sequence
  Description of Artificial Sequence: Synthetic peptide
  Seed: SIGKVCRTLLAKSVF
SIYKVTRALLGKSVF

SEQ ID NO: 276354 - protein, 15 aa, Artificial Sequence
  Description of Artificial Sequence: Synthetic peptide
  Seed: SIGKVCRTLLAKSVF
SIYKVTRALLHKSVF

SEQ ID NO: 276355 - protein, 15 aa, Artificial Sequence
  Description of Artificial Sequence: Synthetic peptide
  Seed: SIGKVCRTLLAKSVF
SIYKVTRALLKKSVF

SEQ ID NO: 276356 - protein, 15 aa, Artificial Sequence
  Description of Artificial Sequence: Synthetic peptide
  Seed: SIGKVCRTLLAKSVF
SIYKVTRALLNKSVF

SEQ ID NO: 276357 - protein, 15 aa, Artificial Sequence
  Description of Artificial Sequence: Synthetic peptide
  Seed: SIGKVCRTLLAKSVF
SIYKVTRALLQKSVF

SEQ ID NO: 276358 - protein, 15 aa, Artificial Sequence
  Description of Artificial Sequence: Synthetic peptide
  Seed: SIGKVCRTLLAKSVF
SIYKVTRALLRKSVF

SEQ ID NO: 276359 - protein, 15 aa, Artificial Sequence
  Description of Artificial Sequence: Synthetic peptide
  Seed: SIGKVCRTLLAKSVF
SIYKVTRALLSKSVF

SEQ ID NO: 276360 - protein, 15 aa, Artificial Sequence
  Description of Artificial Sequence: Synthetic peptide
  Seed: SIGKVCRTLLAKSVF
SIYKVTRALLTKSVF

SEQ ID NO: 276361 - protein, 15 aa, Artificial Sequence
  Description of Artificial Sequence: Synthetic peptide
  Seed: SIGKVCRTLLAKSVF
SIYKVTRALLVKSVF

SEQ ID NO: 276362 - protein, 15 aa, Artificial Sequence
  Description of Artificial Sequence: Synthetic peptide
  Seed: SIGKVCRTLLAKSVF
SIYKVTRGLLAKSVF

SEQ ID NO: 276363 - protein, 15 aa, Artificial Sequence
  Description of Artificial Sequence: Synthetic peptide
  Seed: SIGKVCRTLLAKSVF
SIYKVTRGLLGKSVF

SEQ ID NO: 276364 - protein, 15 aa, Artificial Sequence
  Description of Artificial Sequence: Synthetic peptide
  Seed: SIGKVCRTLLAKSVF
SIYKVTRGLLHKSVF

SEQ ID NO: 276365 - protein, 15 aa, Artificial Sequence
  Description of Artificial Sequence: Synthetic peptide
  Seed: SIGKVCRTLLAKSVF
SIYKVTRGLLSKSVF

SEQ ID NO: 276366 - protein, 15 aa, Artificial Sequence
  Description of Artificial Sequence: Synthetic peptide
  Seed: SIGKVCRTLLAKSVF
SIYKVTRHLLAKSVF

SEQ ID NO: 276367 - protein, 15 aa, Artificial Sequence
  Description of Artificial Sequence: Synthetic peptide
  Seed: SIGKVCRTLLAKSVF
SIYKVTRHLLGKSVF

SEQ ID NO: 276368 - protein, 15 aa, Artificial Sequence
  Description of Artificial Sequence: Synthetic peptide
  Seed: SIGKVCRTLLAKSVF
SIYKVTRHLLHKSVF

SEQ ID NO: 276369 - protein, 15 aa, Artificial Sequence
  Description of Artificial Sequence: Synthetic peptide
  Seed: SIGKVCRTLLAKSVF
SIYKVTRHLLNKSVF

SEQ ID NO: 276370 - protein, 15 aa, Artificial Sequence
  Description of Artificial Sequence: Synthetic peptide
  Seed: SIGKVCRTLLAKSVF
SIYKVTRHLLQKSVF

SEQ ID NO: 276371 - protein, 15 aa, Artificial Sequence
  Description of Artificial Sequence: Synthetic peptide
  Seed: SIGKVCRTLLAKSVF
SIYKVTRHLLSKSVF

SEQ ID NO: 276372 - protein, 15 aa, Artificial Sequence
  Description of Artificial Sequence: Synthetic peptide
  Seed: SIGKVCRTLLAKSVF
SIYKVTRHLLTKSVF

SEQ ID NO: 276373 - protein, 15 aa, Artificial Sequence
  Description of Artificial Sequence: Synthetic peptide
  Seed: SIGKVCRTLLAKSVF
SIYKVTRHLLVKSVF

SEQ ID NO: 276374 - protein, 15 aa, Artificial Sequence
  Description of Artificial Sequence: Synthetic peptide
  Seed: SIGKVCRTLLAKSVF
SIYKVTRKLLAKSVF

SEQ ID NO: 276375 - protein, 15 aa, Artificial Sequence
  Description of Artificial Sequence: Synthetic peptide
  Seed: SIGKVCRTLLAKSVF
SIYKVTRKLLCKSVF

SEQ ID NO: 276376 - protein, 15 aa, Artificial Sequence
  Description of Artificial Sequence: Synthetic peptide
  Seed: SIGKVCRTLLAKSVF
SIYKVTRKLLDKSVF

SEQ ID NO: 276377 - protein, 15 aa, Artificial Sequence
  Description of Artificial Sequence: Synthetic peptide
  Seed: SIGKVCRTLLAKSVF
SIYKVTRKLLEKSVF

SEQ ID NO: 276378 - protein, 15 aa, Artificial Sequence
  Description of Artificial Sequence: Synthetic peptide
  Seed: SIGKVCRTLLAKSVF
SIYKVTRKLLFKSVF

SEQ ID NO: 276379 - protein, 15 aa, Artificial Sequence
  Description of Artificial Sequence: Synthetic peptide
  Seed: SIGKVCRTLLAKSVF
SIYKVTRKLLGKSVF

SEQ ID NO: 276380 - protein, 15 aa, Artificial Sequence
  Description of Artificial Sequence: Synthetic peptide
  Seed: SIGKVCRTLLAKSVF
SIYKVTRKLLHKSVF

SEQ ID NO: 276381 - protein, 15 aa, Artificial Sequence
  Description of Artificial Sequence: Synthetic peptide
  Seed: SIGKVCRTLLAKSVF
SIYKVTRKLLIKSVF

SEQ ID NO: 276382 - protein, 15 aa, Artificial Sequence
  Description of Artificial Sequence: Synthetic peptide
  Seed: SIGKVCRTLLAKSVF
SIYKVTRKLLKKSVF

SEQ ID NO: 276383 - protein, 15 aa, Artificial Sequence
  Description of Artificial Sequence: Synthetic peptide
  Seed: SIGKVCRTLLAKSVF
SIYKVTRKLLLKSVF

SEQ ID NO: 276384 - protein, 15 aa, Artificial Sequence
  Description of Artificial Sequence: Synthetic peptide
  Seed: SIGKVCRTLLAKSVF
SIYKVTRKLLMKSVF

SEQ ID NO: 276385 - protein, 15 aa, Artificial Sequence
  Description of Artificial Sequence: Synthetic peptide
  Seed: SIGKVCRTLLAKSVF
SIYKVTRKLLNKSVF

SEQ ID NO: 276386 - protein, 15 aa, Artificial Sequence
  Description of Artificial Sequence: Synthetic peptide
  Seed: SIGKVCRTLLAKSVF
SIYKVTRKLLPKSVF

SEQ ID NO: 276387 - protein, 15 aa, Artificial Sequence
  Description of Artificial Sequence: Synthetic peptide
  Seed: SIGKVCRTLLAKSVF
SIYKVTRKLLQKSVF

SEQ ID NO: 276388 - protein, 15 aa, Artificial Sequence
  Description of Artificial Sequence: Synthetic peptide
  Seed: SIGKVCRTLLAKSVF
SIYKVTRKLLRKSVF

SEQ ID NO: 276389 - protein, 15 aa, Artificial Sequence
  Description of Artificial Sequence: Synthetic peptide
  Seed: SIGKVCRTLLAKSVF
SIYKVTRKLLSKSVF

SEQ ID NO: 276390 - protein, 15 aa, Artificial Sequence
  Description of Artificial Sequence: Synthetic peptide
  Seed: SIGKVCRTLLAKSVF
SIYKVTRKLLTKSVF

SEQ ID NO: 276391 - protein, 15 aa, Artificial Sequence
  Description of Artificial Sequence: Synthetic peptide
  Seed: SIGKVCRTLLAKSVF
SIYKVTRKLLVKSVF

SEQ ID NO: 276392 - protein, 15 aa, Artificial Sequence
  Description of Artificial Sequence: Synthetic peptide
  Seed: SIGKVCRTLLAKSVF
SIYKVTRKLLWKSVF

SEQ ID NO: 276393 - protein, 15 aa, Artificial Sequence
  Description of Artificial Sequence: Synthetic peptide
  Seed: SIGKVCRTLLAKSVF
SIYKVTRKLLYKSVF

SEQ ID NO: 276394 - protein, 15 aa, Artificial Sequence
  Description of Artificial Sequence: Synthetic peptide
  Seed: SIGKVCRTLLAKSVF
SIYKVTRNLLAKSVF

SEQ ID NO: 276395 - protein, 15 aa, Artificial Sequence
  Description of Artificial Sequence: Synthetic peptide
  Seed: SIGKVCRTLLAKSVF
SIYKVTRNLLDKSVF

SEQ ID NO: 276396 - protein, 15 aa, Artificial Sequence
  Description of Artificial Sequence: Synthetic peptide
  Seed: SIGKVCRTLLAKSVF
SIYKVTRNLLEKSVF

SEQ ID NO: 276397 - protein, 15 aa, Artificial Sequence
  Description of Artificial Sequence: Synthetic peptide
  Seed: SIGKVCRTLLAKSVF
SIYKVTRNLLGKSVF

SEQ ID NO: 276398 - protein, 15 aa, Artificial Sequence
  Description of Artificial Sequence: Synthetic peptide
  Seed: SIGKVCRTLLAKSVF
SIYKVTRNLLHKSVF

SEQ ID NO: 276399 - protein, 15 aa, Artificial Sequence
  Description of Artificial Sequence: Synthetic peptide
  Seed: SIGKVCRTLLAKSVF
SIYKVTRNLLNKSVF

SEQ ID NO: 276400 - protein, 15 aa, Artificial Sequence
  Description of Artificial Sequence: Synthetic peptide
  Seed: SIGKVCRTLLAKSVF
SIYKVTRNLLSKSVF

SEQ ID NO: 276401 - protein, 15 aa, Artificial Sequence
  Description of Artificial Sequence: Synthetic peptide
  Seed: SIGKVCRTLLAKSVF
SIYKVTRNLLTKSVF

SEQ ID NO: 276402 - protein, 15 aa, Artificial Sequence
  Description of Artificial Sequence: Synthetic peptide
  Seed: SIGKVCRTLLAKSVF
SIYKVTRPLLAKSVF

SEQ ID NO: 276403 - protein, 15 aa, Artificial Sequence
  Description of Artificial Sequence: Synthetic peptide
  Seed: SIGKVCRTLLAKSVF
SIYKVTRPLLGKSVF

SEQ ID NO: 276404 - protein, 15 aa, Artificial Sequence
  Description of Artificial Sequence: Synthetic peptide
  Seed: SIGKVCRTLLAKSVF
SIYKVTRPLLHKSVF

SEQ ID NO: 276405 - protein, 15 aa, Artificial Sequence
  Description of Artificial Sequence: Synthetic peptide
  Seed: SIGKVCRTLLAKSVF
SIYKVTRPLLKKSVF

SEQ ID NO: 276406 - protein, 15 aa, Artificial Sequence
  Description of Artificial Sequence: Synthetic peptide
  Seed: SIGKVCRTLLAKSVF
SIYKVTRPLLNKSVF

SEQ ID NO: 276407 - protein, 15 aa, Artificial Sequence
  Description of Artificial Sequence: Synthetic peptide
  Seed: SIGKVCRTLLAKSVF
SIYKVTRPLLQKSVF

SEQ ID NO: 276408 - protein, 15 aa, Artificial Sequence
  Description of Artificial Sequence: Synthetic peptide
  Seed: SIGKVCRTLLAKSVF
SIYKVTRPLLRKSVF

SEQ ID NO: 276409 - protein, 15 aa, Artificial Sequence
  Description of Artificial Sequence: Synthetic peptide
  Seed: SIGKVCRTLLAKSVF
SIYKVTRPLLSKSVF

SEQ ID NO: 276410 - protein, 15 aa, Artificial Sequence
  Description of Artificial Sequence: Synthetic peptide
  Seed: SIGKVCRTLLAKSVF
SIYKVTRPLLTKSVF

SEQ ID NO: 276411 - protein, 15 aa, Artificial Sequence
  Description of Artificial Sequence: Synthetic peptide
  Seed: SIGKVCRTLLAKSVF
SIYKVTRPLLVKSVF

SEQ ID NO: 276412 - protein, 15 aa, Artificial Sequence
  Description of Artificial Sequence: Synthetic peptide
  Seed: SIGKVCRTLLAKSVF
SIYKVTRQLLAKSVF

SEQ ID NO: 276413 - protein, 15 aa, Artificial Sequence
  Description of Artificial Sequence: Synthetic peptide
  Seed: SIGKVCRTLLAKSVF
SIYKVTRQLLSKSVF

SEQ ID NO: 276414 - protein, 15 aa, Artificial Sequence
  Description of Artificial Sequence: Synthetic peptide
  Seed: SIGKVCRTLLAKSVF
SIYKVTRRLLAKSVF

SEQ ID NO: 276415 - protein, 15 aa, Artificial Sequence
  Description of Artificial Sequence: Synthetic peptide
  Seed: SIGKVCRTLLAKSVF
SIYKVTRRLLCKSVF

SEQ ID NO: 276416 - protein, 15 aa, Artificial Sequence
  Description of Artificial Sequence: Synthetic peptide
  Seed: SIGKVCRTLLAKSVF
SIYKVTRRLLDKSVF

SEQ ID NO: 276417 - protein, 15 aa, Artificial Sequence
  Description of Artificial Sequence: Synthetic peptide
  Seed: SIGKVCRTLLAKSVF
SIYKVTRRLLEKSVF

SEQ ID NO: 276418 - protein, 15 aa, Artificial Sequence
  Description of Artificial Sequence: Synthetic peptide
  Seed: SIGKVCRTLLAKSVF
SIYKVTRRLLFKSVF

SEQ ID NO: 276419 - protein, 15 aa, Artificial Sequence
  Description of Artificial Sequence: Synthetic peptide
  Seed: SIGKVCRTLLAKSVF
SIYKVTRRLLGKSVF

SEQ ID NO: 276420 - protein, 15 aa, Artificial Sequence
  Description of Artificial Sequence: Synthetic peptide
  Seed: SIGKVCRTLLAKSVF
SIYKVTRRLLHKSVF

SEQ ID NO: 276421 - protein, 15 aa, Artificial Sequence
  Description of Artificial Sequence: Synthetic peptide
  Seed: SIGKVCRTLLAKSVF
SIYKVTRRLLIKSVF

SEQ ID NO: 276422 - protein, 15 aa, Artificial Sequence
  Description of Artificial Sequence: Synthetic peptide
  Seed: SIGKVCRTLLAKSVF
SIYKVTRRLLKKSVF

SEQ ID NO: 276423 - protein, 15 aa, Artificial Sequence
  Description of Artificial Sequence: Synthetic peptide
  Seed: SIGKVCRTLLAKSVF
SIYKVTRRLLLKSVF

SEQ ID NO: 276424 - protein, 15 aa, Artificial Sequence
  Description of Artificial Sequence: Synthetic peptide
  Seed: SIGKVCRTLLAKSVF
SIYKVTRRLLMKSVF

SEQ ID NO: 276425 - protein, 15 aa, Artificial Sequence
  Description of Artificial Sequence: Synthetic peptide
  Seed: SIGKVCRTLLAKSVF
SIYKVTRRLLNKSVF

SEQ ID NO: 276426 - protein, 15 aa, Artificial Sequence
  Description of Artificial Sequence: Synthetic peptide
  Seed: SIGKVCRTLLAKSVF
SIYKVTRRLLPKSVF

SEQ ID NO: 276427 - protein, 15 aa, Artificial Sequence
  Description of Artificial Sequence: Synthetic peptide
  Seed: SIGKVCRTLLAKSVF
SIYKVTRRLLQKSVF

SEQ ID NO: 276428 - protein, 15 aa, Artificial Sequence
  Description of Artificial Sequence: Synthetic peptide
  Seed: SIGKVCRTLLAKSVF
SIYKVTRRLLRKSVF

SEQ ID NO: 276429 - protein, 15 aa, Artificial Sequence
  Description of Artificial Sequence: Synthetic peptide
  Seed: SIGKVCRTLLAKSVF
SIYKVTRRLLSKSVF

SEQ ID NO: 276430 - protein, 15 aa, Artificial Sequence
  Description of Artificial Sequence: Synthetic peptide
  Seed: SIGKVCRTLLAKSVF
SIYKVTRRLLTKSVF

SEQ ID NO: 276431 - protein, 15 aa, Artificial Sequence
  Description of Artificial Sequence: Synthetic peptide
  Seed: SIGKVCRTLLAKSVF
SIYKVTRRLLVKSVF

SEQ ID NO: 276432 - protein, 15 aa, Artificial Sequence
  Description of Artificial Sequence: Synthetic peptide
  Seed: SIGKVCRTLLAKSVF
SIYKVTRRLLWKSVF

SEQ ID NO: 276433 - protein, 15 aa, Artificial Sequence
  Description of Artificial Sequence: Synthetic peptide
  Seed: SIGKVCRTLLAKSVF
SIYKVTRRLLYKSVF

SEQ ID NO: 276434 - protein, 15 aa, Artificial Sequence
  Description of Artificial Sequence: Synthetic peptide
  Seed: SIGKVCRTLLAKSVF
SIYKVTRSLLAKSVF

SEQ ID NO: 276435 - protein, 15 aa, Artificial Sequence
  Description of Artificial Sequence: Synthetic peptide
  Seed: SIGKVCRTLLAKSVF
SIYKVTRSLLDKSVF

SEQ ID NO: 276436 - protein, 15 aa, Artificial Sequence
  Description of Artificial Sequence: Synthetic peptide
  Seed: SIGKVCRTLLAKSVF
SIYKVTRSLLEKSVF

SEQ ID NO: 276437 - protein, 15 aa, Artificial Sequence
  Description of Artificial Sequence: Synthetic peptide
  Seed: SIGKVCRTLLAKSVF
SIYKVTRSLLGKSVF

SEQ ID NO: 276438 - protein, 15 aa, Artificial Sequence
  Description of Artificial Sequence: Synthetic peptide
  Seed: SIGKVCRTLLAKSVF
SIYKVTRSLLHKSVF

SEQ ID NO: 276439 - protein, 15 aa, Artificial Sequence
  Description of Artificial Sequence: Synthetic peptide
  Seed: SIGKVCRTLLAKSVF
SIYKVTRSLLKKSVF

SEQ ID NO: 276440 - protein, 15 aa, Artificial Sequence
  Description of Artificial Sequence: Synthetic peptide
  Seed: SIGKVCRTLLAKSVF
SIYKVTRSLLNKSVF

SEQ ID NO: 276441 - protein, 15 aa, Artificial Sequence
  Description of Artificial Sequence: Synthetic peptide
  Seed: SIGKVCRTLLAKSVF
SIYKVTRSLLQKSVF

SEQ ID NO: 276442 - protein, 15 aa, Artificial Sequence
  Description of Artificial Sequence: Synthetic peptide
  Seed: SIGKVCRTLLAKSVF
SIYKVTRSLLRKSVF

SEQ ID NO: 276443 - protein, 15 aa, Artificial Sequence
  Description of Artificial Sequence: Synthetic peptide
  Seed: SIGKVCRTLLAKSVF
SIYKVTRSLLSKSVF

SEQ ID NO: 276444 - protein, 15 aa, Artificial Sequence
  Description of Artificial Sequence: Synthetic peptide
  Seed: SIGKVCRTLLAKSVF
SIYKVTRSLLTKSVF

SEQ ID NO: 276445 - protein, 15 aa, Artificial Sequence
  Description of Artificial Sequence: Synthetic peptide
  Seed: SIGKVCRTLLAKSVF
SIYKVTRSLLVKSVF

SEQ ID NO: 276446 - protein, 15 aa, Artificial Sequence
  Description of Artificial Sequence: Synthetic peptide
  Seed: SIGKVCRTLLAKSVF
SIYKVTRTLLAKSVF

SEQ ID NO: 276447 - protein, 15 aa, Artificial Sequence
  Description of Artificial Sequence: Synthetic peptide
  Seed: SIGKVCRTLLAKSVF
SIYKVTRTLLDKSVF

SEQ ID NO: 276448 - protein, 15 aa, Artificial Sequence
  Description of Artificial Sequence: Synthetic peptide
  Seed: SIGKVCRTLLAKSVF
SIYKVTRTLLEKSVF

SEQ ID NO: 276449 - protein, 15 aa, Artificial Sequence
  Description of Artificial Sequence: Synthetic peptide
  Seed: SIGKVCRTLLAKSVF
SIYKVTRTLLGKSVF

SEQ ID NO: 276450 - protein, 15 aa, Artificial Sequence
  Description of Artificial Sequence: Synthetic peptide
  Seed: SIGKVCRTLLAKSVF
SIYKVTRTLLHKSVF

SEQ ID NO: 276451 - protein, 15 aa, Artificial Sequence
  Description of Artificial Sequence: Synthetic peptide
  Seed: SIGKVCRTLLAKSVF
SIYKVTRTLLKKSVF

SEQ ID NO: 276452 - protein, 15 aa, Artificial Sequence
  Description of Artificial Sequence: Synthetic peptide
  Seed: SIGKVCRTLLAKSVF
SIYKVTRTLLNKSVF

SEQ ID NO: 276453 - protein, 15 aa, Artificial Sequence
  Description of Artificial Sequence: Synthetic peptide
  Seed: SIGKVCRTLLAKSVF
SIYKVTRTLLQKSVF

SEQ ID NO: 276454 - protein, 15 aa, Artificial Sequence
  Description of Artificial Sequence: Synthetic peptide
  Seed: SIGKVCRTLLAKSVF
SIYKVTRTLLRKSVF

SEQ ID NO: 276455 - protein, 15 aa, Artificial Sequence
  Description of Artificial Sequence: Synthetic peptide
  Seed: SIGKVCRTLLAKSVF
SIYKVTRTLLSKSVF

SEQ ID NO: 276456 - protein, 15 aa, Artificial Sequence
  Description of Artificial Sequence: Synthetic peptide
  Seed: SIGKVCRTLLAKSVF
SIYKVTRTLLTKSVF

SEQ ID NO: 276457 - protein, 15 aa, Artificial Sequence
  Description of Artificial Sequence: Synthetic peptide
  Seed: SIGKVCRTLLAKSVF
SIYKVTRTLLVKSVF

SEQ ID NO: 276458 - protein, 15 aa, Artificial Sequence
  Description of Artificial Sequence: Synthetic peptide
  Seed: SIGKVCRTLLAKSVF
SIYKVTRVLLAKSVF

SEQ ID NO: 276459 - protein, 15 aa, Artificial Sequence
  Description of Artificial Sequence: Synthetic peptide
  Seed: SIGKVCRTLLAKSVF
SIYKVTRVLLDKSVF

SEQ ID NO: 276460 - protein, 15 aa, Artificial Sequence
  Description of Artificial Sequence: Synthetic peptide
  Seed: SIGKVCRTLLAKSVF
SIYKVTRVLLKKSVF

SEQ ID NO: 276461 - protein, 15 aa, Artificial Sequence
  Description of Artificial Sequence: Synthetic peptide
  Seed: SIGKVCRTLLAKSVF
SIYKVTRVLLSKSVF

SEQ ID NO: 276462 - protein, 15 aa, Artificial Sequence
  Description of Artificial Sequence: Synthetic peptide
  Seed: SIGKVCRTLLAKSVF
SIYKVVRALLAKSVF

SEQ ID NO: 276463 - protein, 15 aa, Artificial Sequence
  Description of Artificial Sequence: Synthetic peptide
  Seed: SIGKVCRTLLAKSVF
SIYKVVRALLDKSVF

SEQ ID NO: 276464 - protein, 15 aa, Artificial Sequence
  Description of Artificial Sequence: Synthetic peptide
  Seed: SIGKVCRTLLAKSVF
SIYKVVRALLEKSVF

SEQ ID NO: 276465 - protein, 15 aa, Artificial Sequence
  Description of Artificial Sequence: Synthetic peptide
  Seed: SIGKVCRTLLAKSVF
SIYKVVRALLGKSVF

SEQ ID NO: 276466 - protein, 15 aa, Artificial Sequence
  Description of Artificial Sequence: Synthetic peptide
  Seed: SIGKVCRTLLAKSVF
SIYKVVRALLHKSVF

SEQ ID NO: 276467 - protein, 15 aa, Artificial Sequence
  Description of Artificial Sequence: Synthetic peptide
  Seed: SIGKVCRTLLAKSVF
SIYKVVRALLKKSVF

SEQ ID NO: 276468 - protein, 15 aa, Artificial Sequence
  Description of Artificial Sequence: Synthetic peptide
  Seed: SIGKVCRTLLAKSVF
SIYKVVRALLNKSVF

SEQ ID NO: 276469 - protein, 15 aa, Artificial Sequence
  Description of Artificial Sequence: Synthetic peptide
  Seed: SIGKVCRTLLAKSVF
SIYKVVRALLQKSVF

SEQ ID NO: 276470 - protein, 15 aa, Artificial Sequence
  Description of Artificial Sequence: Synthetic peptide
  Seed: SIGKVCRTLLAKSVF
SIYKVVRALLRKSVF

SEQ ID NO: 276471 - protein, 15 aa, Artificial Sequence
  Description of Artificial Sequence: Synthetic peptide
  Seed: SIGKVCRTLLAKSVF
SIYKVVRALLSKSVF

SEQ ID NO: 276472 - protein, 15 aa, Artificial Sequence
  Description of Artificial Sequence: Synthetic peptide
  Seed: SIGKVCRTLLAKSVF
SIYKVVRALLTKSVF

SEQ ID NO: 276473 - protein, 15 aa, Artificial Sequence
  Description of Artificial Sequence: Synthetic peptide
  Seed: SIGKVCRTLLAKSVF
SIYKVVRGLLAKSVF

SEQ ID NO: 276474 - protein, 15 aa, Artificial Sequence
  Description of Artificial Sequence: Synthetic peptide
  Seed: SIGKVCRTLLAKSVF
SIYKVVRGLLDKSVF

SEQ ID NO: 276475 - protein, 15 aa, Artificial Sequence
  Description of Artificial Sequence: Synthetic peptide
  Seed: SIGKVCRTLLAKSVF
SIYKVVRGLLGKSVF

SEQ ID NO: 276476 - protein, 15 aa, Artificial Sequence
  Description of Artificial Sequence: Synthetic peptide
  Seed: SIGKVCRTLLAKSVF
SIYKVVRGLLHKSVF

SEQ ID NO: 276477 - protein, 15 aa, Artificial Sequence
  Description of Artificial Sequence: Synthetic peptide
  Seed: SIGKVCRTLLAKSVF
SIYKVVRGLLKKSVF

SEQ ID NO: 276478 - protein, 15 aa, Artificial Sequence
  Description of Artificial Sequence: Synthetic peptide
  Seed: SIGKVCRTLLAKSVF
SIYKVVRGLLNKSVF

SEQ ID NO: 276479 - protein, 15 aa, Artificial Sequence
  Description of Artificial Sequence: Synthetic peptide
  Seed: SIGKVCRTLLAKSVF
SIYKVVRGLLQKSVF

SEQ ID NO: 276480 - protein, 15 aa, Artificial Sequence
  Description of Artificial Sequence: Synthetic peptide
  Seed: SIGKVCRTLLAKSVF
SIYKVVRGLLRKSVF

SEQ ID NO: 276481 - protein, 15 aa, Artificial Sequence
  Description of Artificial Sequence: Synthetic peptide
  Seed: SIGKVCRTLLAKSVF
SIYKVVRGLLSKSVF

SEQ ID NO: 276482 - protein, 15 aa, Artificial Sequence
  Description of Artificial Sequence: Synthetic peptide
  Seed: SIGKVCRTLLAKSVF
SIYKVVRGLLTKSVF

SEQ ID NO: 276483 - protein, 15 aa, Artificial Sequence
  Description of Artificial Sequence: Synthetic peptide
  Seed: SIGKVCRTLLAKSVF
SIYKVVRHLLAKSVF

SEQ ID NO: 276484 - protein, 15 aa, Artificial Sequence
  Description of Artificial Sequence: Synthetic peptide
  Seed: SIGKVCRTLLAKSVF
SIYKVVRHLLGKSVF

SEQ ID NO: 276485 - protein, 15 aa, Artificial Sequence
  Description of Artificial Sequence: Synthetic peptide
  Seed: SIGKVCRTLLAKSVF
SIYKVVRHLLHKSVF

SEQ ID NO: 276486 - protein, 15 aa, Artificial Sequence
  Description of Artificial Sequence: Synthetic peptide
  Seed: SIGKVCRTLLAKSVF
SIYKVVRHLLKKSVF

SEQ ID NO: 276487 - protein, 15 aa, Artificial Sequence
  Description of Artificial Sequence: Synthetic peptide
  Seed: SIGKVCRTLLAKSVF
SIYKVVRHLLMKSVF

SEQ ID NO: 276488 - protein, 15 aa, Artificial Sequence
  Description of Artificial Sequence: Synthetic peptide
  Seed: SIGKVCRTLLAKSVF
SIYKVVRHLLNKSVF

SEQ ID NO: 276489 - protein, 15 aa, Artificial Sequence
  Description of Artificial Sequence: Synthetic peptide
  Seed: SIGKVCRTLLAKSVF
SIYKVVRHLLPKSVF

SEQ ID NO: 276490 - protein, 15 aa, Artificial Sequence
  Description of Artificial Sequence: Synthetic peptide
  Seed: SIGKVCRTLLAKSVF
SIYKVVRHLLQKSVF

SEQ ID NO: 276491 - protein, 15 aa, Artificial Sequence
  Description of Artificial Sequence: Synthetic peptide
  Seed: SIGKVCRTLLAKSVF
SIYKVVRHLLRKSVF

SEQ ID NO: 276492 - protein, 15 aa, Artificial Sequence
  Description of Artificial Sequence: Synthetic peptide
  Seed: SIGKVCRTLLAKSVF
SIYKVVRHLLSKSVF

SEQ ID NO: 276493 - protein, 15 aa, Artificial Sequence
  Description of Artificial Sequence: Synthetic peptide
  Seed: SIGKVCRTLLAKSVF
SIYKVVRHLLTKSVF

SEQ ID NO: 276494 - protein, 15 aa, Artificial Sequence
  Description of Artificial Sequence: Synthetic peptide
  Seed: SIGKVCRTLLAKSVF
SIYKVVRHLLVKSVF

SEQ ID NO: 276495 - protein, 15 aa, Artificial Sequence
  Description of Artificial Sequence: Synthetic peptide
  Seed: SIGKVCRTLLAKSVF
SIYKVVRHLLYKSVF

SEQ ID NO: 276496 - protein, 15 aa, Artificial Sequence
  Description of Artificial Sequence: Synthetic peptide
  Seed: SIGKVCRTLLAKSVF
SIYKVVRILLDKSVF

SEQ ID NO: 276497 - protein, 15 aa, Artificial Sequence
  Description of Artificial Sequence: Synthetic peptide
  Seed: SIGKVCRTLLAKSVF
SIYKVVRILLHKSVF

SEQ ID NO: 276498 - protein, 15 aa, Artificial Sequence
  Description of Artificial Sequence: Synthetic peptide
  Seed: SIGKVCRTLLAKSVF
SIYKVVRKLLAKSVF

SEQ ID NO: 276499 - protein, 15 aa, Artificial Sequence
  Description of Artificial Sequence: Synthetic peptide
  Seed: SIGKVCRTLLAKSVF
SIYKVVRKLLCKSVF

SEQ ID NO: 276500 - protein, 15 aa, Artificial Sequence
  Description of Artificial Sequence: Synthetic peptide
  Seed: SIGKVCRTLLAKSVF
SIYKVVRKLLDKSVF

SEQ ID NO: 276501 - protein, 15 aa, Artificial Sequence
  Description of Artificial Sequence: Synthetic peptide
  Seed: SIGKVCRTLLAKSVF
SIYKVVRKLLEKSVF

SEQ ID NO: 276502 - protein, 15 aa, Artificial Sequence
  Description of Artificial Sequence: Synthetic peptide
  Seed: SIGKVCRTLLAKSVF
SIYKVVRKLLFKSVF

SEQ ID NO: 276503 - protein, 15 aa, Artificial Sequence
  Description of Artificial Sequence: Synthetic peptide
  Seed: SIGKVCRTLLAKSVF
SIYKVVRKLLGKSVF

SEQ ID NO: 276504 - protein, 15 aa, Artificial Sequence
  Description of Artificial Sequence: Synthetic peptide
  Seed: SIGKVCRTLLAKSVF
SIYKVVRKLLHKSVF

SEQ ID NO: 276505 - protein, 15 aa, Artificial Sequence
  Description of Artificial Sequence: Synthetic peptide
  Seed: SIGKVCRTLLAKSVF
SIYKVVRKLLIKSVF

SEQ ID NO: 276506 - protein, 15 aa, Artificial Sequence
  Description of Artificial Sequence: Synthetic peptide
  Seed: SIGKVCRTLLAKSVF
SIYKVVRKLLKKSVF

SEQ ID NO: 276507 - protein, 15 aa, Artificial Sequence
  Description of Artificial Sequence: Synthetic peptide
  Seed: SIGKVCRTLLAKSVF
SIYKVVRKLLLKSVF

SEQ ID NO: 276508 - protein, 15 aa, Artificial Sequence
  Description of Artificial Sequence: Synthetic peptide
  Seed: SIGKVCRTLLAKSVF
SIYKVVRKLLMKSVF

SEQ ID NO: 276509 - protein, 15 aa, Artificial Sequence
  Description of Artificial Sequence: Synthetic peptide
  Seed: SIGKVCRTLLAKSVF
SIYKVVRKLLNKSVF

SEQ ID NO: 276510 - protein, 15 aa, Artificial Sequence
  Description of Artificial Sequence: Synthetic peptide
  Seed: SIGKVCRTLLAKSVF
SIYKVVRKLLPKSVF

SEQ ID NO: 276511 - protein, 15 aa, Artificial Sequence
  Description of Artificial Sequence: Synthetic peptide
  Seed: SIGKVCRTLLAKSVF
SIYKVVRKLLQKSVF

SEQ ID NO: 276512 - protein, 15 aa, Artificial Sequence
  Description of Artificial Sequence: Synthetic peptide
  Seed: SIGKVCRTLLAKSVF
SIYKVVRKLLRKSVF

SEQ ID NO: 276513 - protein, 15 aa, Artificial Sequence
  Description of Artificial Sequence: Synthetic peptide
  Seed: SIGKVCRTLLAKSVF
SIYKVVRKLLSKSVF

SEQ ID NO: 276514 - protein, 15 aa, Artificial Sequence
  Description of Artificial Sequence: Synthetic peptide
  Seed: SIGKVCRTLLAKSVF
SIYKVVRKLLTKSVF

SEQ ID NO: 276515 - protein, 15 aa, Artificial Sequence
  Description of Artificial Sequence: Synthetic peptide
  Seed: SIGKVCRTLLAKSVF
SIYKVVRKLLVKSVF

SEQ ID NO: 276516 - protein, 15 aa, Artificial Sequence
  Description of Artificial Sequence: Synthetic peptide
  Seed: SIGKVCRTLLAKSVF
SIYKVVRKLLWKSVF

SEQ ID NO: 276517 - protein, 15 aa, Artificial Sequence
  Description of Artificial Sequence: Synthetic peptide
  Seed: SIGKVCRTLLAKSVF
SIYKVVRKLLYKSVF

SEQ ID NO: 276518 - protein, 15 aa, Artificial Sequence
  Description of Artificial Sequence: Synthetic peptide
  Seed: SIGKVCRTLLAKSVF
SIYKVVRNLLAKSVF

SEQ ID NO: 276519 - protein, 15 aa, Artificial Sequence
  Description of Artificial Sequence: Synthetic peptide
  Seed: SIGKVCRTLLAKSVF
SIYKVVRNLLDKSVF

SEQ ID NO: 276520 - protein, 15 aa, Artificial Sequence
  Description of Artificial Sequence: Synthetic peptide
  Seed: SIGKVCRTLLAKSVF
SIYKVVRNLLEKSVF

SEQ ID NO: 276521 - protein, 15 aa, Artificial Sequence
  Description of Artificial Sequence: Synthetic peptide
  Seed: SIGKVCRTLLAKSVF
SIYKVVRNLLGKSVF

SEQ ID NO: 276522 - protein, 15 aa, Artificial Sequence
  Description of Artificial Sequence: Synthetic peptide
  Seed: SIGKVCRTLLAKSVF
SIYKVVRNLLHKSVF

SEQ ID NO: 276523 - protein, 15 aa, Artificial Sequence
  Description of Artificial Sequence: Synthetic peptide
  Seed: SIGKVCRTLLAKSVF
SIYKVVRNLLKKSVF

SEQ ID NO: 276524 - protein, 15 aa, Artificial Sequence
  Description of Artificial Sequence: Synthetic peptide
  Seed: SIGKVCRTLLAKSVF
SIYKVVRNLLNKSVF

SEQ ID NO: 276525 - protein, 15 aa, Artificial Sequence
  Description of Artificial Sequence: Synthetic peptide
  Seed: SIGKVCRTLLAKSVF
SIYKVVRNLLQKSVF

SEQ ID NO: 276526 - protein, 15 aa, Artificial Sequence
  Description of Artificial Sequence: Synthetic peptide
  Seed: SIGKVCRTLLAKSVF
SIYKVVRNLLRKSVF

SEQ ID NO: 276527 - protein, 15 aa, Artificial Sequence
  Description of Artificial Sequence: Synthetic peptide
  Seed: SIGKVCRTLLAKSVF
SIYKVVRNLLSKSVF

SEQ ID NO: 276528 - protein, 15 aa, Artificial Sequence
  Description of Artificial Sequence: Synthetic peptide
  Seed: SIGKVCRTLLAKSVF
SIYKVVRNLLTKSVF

SEQ ID NO: 276529 - protein, 15 aa, Artificial Sequence
  Description of Artificial Sequence: Synthetic peptide
  Seed: SIGKVCRTLLAKSVF
SIYKVVRNLLVKSVF

SEQ ID NO: 276530 - protein, 15 aa, Artificial Sequence
  Description of Artificial Sequence: Synthetic peptide
  Seed: SIGKVCRTLLAKSVF
SIYKVVRPLLAKSVF

SEQ ID NO: 276531 - protein, 15 aa, Artificial Sequence
  Description of Artificial Sequence: Synthetic peptide
  Seed: SIGKVCRTLLAKSVF
SIYKVVRPLLDKSVF

SEQ ID NO: 276532 - protein, 15 aa, Artificial Sequence
  Description of Artificial Sequence: Synthetic peptide
  Seed: SIGKVCRTLLAKSVF
SIYKVVRPLLGKSVF

SEQ ID NO: 276533 - protein, 15 aa, Artificial Sequence
  Description of Artificial Sequence: Synthetic peptide
  Seed: SIGKVCRTLLAKSVF
SIYKVVRPLLHKSVF

SEQ ID NO: 276534 - protein, 15 aa, Artificial Sequence
  Description of Artificial Sequence: Synthetic peptide
  Seed: SIGKVCRTLLAKSVF
SIYKVVRPLLKKSVF

SEQ ID NO: 276535 - protein, 15 aa, Artificial Sequence
  Description of Artificial Sequence: Synthetic peptide
  Seed: SIGKVCRTLLAKSVF
SIYKVVRPLLMKSVF

SEQ ID NO: 276536 - protein, 15 aa, Artificial Sequence
  Description of Artificial Sequence: Synthetic peptide
  Seed: SIGKVCRTLLAKSVF
SIYKVVRPLLNKSVF

SEQ ID NO: 276537 - protein, 15 aa, Artificial Sequence
  Description of Artificial Sequence: Synthetic peptide
  Seed: SIGKVCRTLLAKSVF
SIYKVVRPLLQKSVF

SEQ ID NO: 276538 - protein, 15 aa, Artificial Sequence
  Description of Artificial Sequence: Synthetic peptide
  Seed: SIGKVCRTLLAKSVF
SIYKVVRPLLRKSVF

SEQ ID NO: 276539 - protein, 15 aa, Artificial Sequence
  Description of Artificial Sequence: Synthetic peptide
  Seed: SIGKVCRTLLAKSVF
SIYKVVRPLLSKSVF

SEQ ID NO: 276540 - protein, 15 aa, Artificial Sequence
  Description of Artificial Sequence: Synthetic peptide
  Seed: SIGKVCRTLLAKSVF
SIYKVVRPLLTKSVF

SEQ ID NO: 276541 - protein, 15 aa, Artificial Sequence
  Description of Artificial Sequence: Synthetic peptide
  Seed: SIGKVCRTLLAKSVF
SIYKVVRPLLVKSVF

SEQ ID NO: 276542 - protein, 15 aa, Artificial Sequence
  Description of Artificial Sequence: Synthetic peptide
  Seed: SIGKVCRTLLAKSVF
SIYKVVRPLLYKSVF

SEQ ID NO: 276543 - protein, 15 aa, Artificial Sequence
  Description of Artificial Sequence: Synthetic peptide
  Seed: SIGKVCRTLLAKSVF
SIYKVVRQLLAKSVF

SEQ ID NO: 276544 - protein, 15 aa, Artificial Sequence
  Description of Artificial Sequence: Synthetic peptide
  Seed: SIGKVCRTLLAKSVF
SIYKVVRQLLGKSVF

SEQ ID NO: 276545 - protein, 15 aa, Artificial Sequence
  Description of Artificial Sequence: Synthetic peptide
  Seed: SIGKVCRTLLAKSVF
SIYKVVRQLLHKSVF

SEQ ID NO: 276546 - protein, 15 aa, Artificial Sequence
  Description of Artificial Sequence: Synthetic peptide
  Seed: SIGKVCRTLLAKSVF
SIYKVVRQLLNKSVF

SEQ ID NO: 276547 - protein, 15 aa, Artificial Sequence
  Description of Artificial Sequence: Synthetic peptide
  Seed: SIGKVCRTLLAKSVF
SIYKVVRQLLSKSVF

SEQ ID NO: 276548 - protein, 15 aa, Artificial Sequence
  Description of Artificial Sequence: Synthetic peptide
  Seed: SIGKVCRTLLAKSVF
SIYKVVRQLLTKSVF

SEQ ID NO: 276549 - protein, 15 aa, Artificial Sequence
  Description of Artificial Sequence: Synthetic peptide
  Seed: SIGKVCRTLLAKSVF
SIYKVVRRLLAKSVF

SEQ ID NO: 276550 - protein, 15 aa, Artificial Sequence
  Description of Artificial Sequence: Synthetic peptide
  Seed: SIGKVCRTLLAKSVF
SIYKVVRRLLCKSVF

SEQ ID NO: 276551 - protein, 15 aa, Artificial Sequence
  Description of Artificial Sequence: Synthetic peptide
  Seed: SIGKVCRTLLAKSVF
SIYKVVRRLLDKSVF

SEQ ID NO: 276552 - protein, 15 aa, Artificial Sequence
  Description of Artificial Sequence: Synthetic peptide
  Seed: SIGKVCRTLLAKSVF
SIYKVVRRLLEKSVF

SEQ ID NO: 276553 - protein, 15 aa, Artificial Sequence
  Description of Artificial Sequence: Synthetic peptide
  Seed: SIGKVCRTLLAKSVF
SIYKVVRRLLFKSVF

SEQ ID NO: 276554 - protein, 15 aa, Artificial Sequence
  Description of Artificial Sequence: Synthetic peptide
  Seed: SIGKVCRTLLAKSVF
SIYKVVRRLLGKSVF

SEQ ID NO: 276555 - protein, 15 aa, Artificial Sequence
  Description of Artificial Sequence: Synthetic peptide
  Seed: SIGKVCRTLLAKSVF
SIYKVVRRLLHKSVF

SEQ ID NO: 276556 - protein, 15 aa, Artificial Sequence
  Description of Artificial Sequence: Synthetic peptide
  Seed: SIGKVCRTLLAKSVF
SIYKVVRRLLIKSVF

SEQ ID NO: 276557 - protein, 15 aa, Artificial Sequence
  Description of Artificial Sequence: Synthetic peptide
  Seed: SIGKVCRTLLAKSVF
SIYKVVRRLLKKSVF

SEQ ID NO: 276558 - protein, 15 aa, Artificial Sequence
  Description of Artificial Sequence: Synthetic peptide
  Seed: SIGKVCRTLLAKSVF
SIYKVVRRLLLKSVF

SEQ ID NO: 276559 - protein, 15 aa, Artificial Sequence
  Description of Artificial Sequence: Synthetic peptide
  Seed: SIGKVCRTLLAKSVF
SIYKVVRRLLMKSVF

SEQ ID NO: 276560 - protein, 15 aa, Artificial Sequence
  Description of Artificial Sequence: Synthetic peptide
  Seed: SIGKVCRTLLAKSVF
SIYKVVRRLLNKSVF

SEQ ID NO: 276561 - protein, 15 aa, Artificial Sequence
  Description of Artificial Sequence: Synthetic peptide
  Seed: SIGKVCRTLLAKSVF
SIYKVVRRLLPKSVF

SEQ ID NO: 276562 - protein, 15 aa, Artificial Sequence
  Description of Artificial Sequence: Synthetic peptide
  Seed: SIGKVCRTLLAKSVF
SIYKVVRRLLQKSVF

SEQ ID NO: 276563 - protein, 15 aa, Artificial Sequence
  Description of Artificial Sequence: Synthetic peptide
  Seed: SIGKVCRTLLAKSVF
SIYKVVRRLLRKSVF

SEQ ID NO: 276564 - protein, 15 aa, Artificial Sequence
  Description of Artificial Sequence: Synthetic peptide
  Seed: SIGKVCRTLLAKSVF
SIYKVVRRLLSKSVF

SEQ ID NO: 276565 - protein, 15 aa, Artificial Sequence
  Description of Artificial Sequence: Synthetic peptide
  Seed: SIGKVCRTLLAKSVF
SIYKVVRRLLTKSVF

SEQ ID NO: 276566 - protein, 15 aa, Artificial Sequence
  Description of Artificial Sequence: Synthetic peptide
  Seed: SIGKVCRTLLAKSVF
SIYKVVRRLLVKSVF

SEQ ID NO: 276567 - protein, 15 aa, Artificial Sequence
  Description of Artificial Sequence: Synthetic peptide
  Seed: SIGKVCRTLLAKSVF
SIYKVVRRLLWKSVF

SEQ ID NO: 276568 - protein, 15 aa, Artificial Sequence
  Description of Artificial Sequence: Synthetic peptide
  Seed: SIGKVCRTLLAKSVF
SIYKVVRRLLYKSVF

SEQ ID NO: 276569 - protein, 15 aa, Artificial Sequence
  Description of Artificial Sequence: Synthetic peptide
  Seed: SIGKVCRTLLAKSVF
SIYKVVRSLLAKSVF

SEQ ID NO: 276570 - protein, 15 aa, Artificial Sequence
  Description of Artificial Sequence: Synthetic peptide
  Seed: SIGKVCRTLLAKSVF
SIYKVVRSLLDKSVF

SEQ ID NO: 276571 - protein, 15 aa, Artificial Sequence
  Description of Artificial Sequence: Synthetic peptide
  Seed: SIGKVCRTLLAKSVF
SIYKVVRSLLEKSVF

SEQ ID NO: 276572 - protein, 15 aa, Artificial Sequence
  Description of Artificial Sequence: Synthetic peptide
  Seed: SIGKVCRTLLAKSVF
SIYKVVRSLLGKSVF

SEQ ID NO: 276573 - protein, 15 aa, Artificial Sequence
  Description of Artificial Sequence: Synthetic peptide
  Seed: SIGKVCRTLLAKSVF
SIYKVVRSLLHKSVF

SEQ ID NO: 276574 - protein, 15 aa, Artificial Sequence
  Description of Artificial Sequence: Synthetic peptide
  Seed: SIGKVCRTLLAKSVF
SIYKVVRSLLKKSVF

SEQ ID NO: 276575 - protein, 15 aa, Artificial Sequence
  Description of Artificial Sequence: Synthetic peptide
  Seed: SIGKVCRTLLAKSVF
SIYKVVRSLLNKSVF

SEQ ID NO: 276576 - protein, 15 aa, Artificial Sequence
  Description of Artificial Sequence: Synthetic peptide
  Seed: SIGKVCRTLLAKSVF
SIYKVVRSLLQKSVF

SEQ ID NO: 276577 - protein, 15 aa, Artificial Sequence
  Description of Artificial Sequence: Synthetic peptide
  Seed: SIGKVCRTLLAKSVF
SIYKVVRSLLRKSVF

SEQ ID NO: 276578 - protein, 15 aa, Artificial Sequence
  Description of Artificial Sequence: Synthetic peptide
  Seed: SIGKVCRTLLAKSVF
SIYKVVRSLLSKSVF

SEQ ID NO: 276579 - protein, 15 aa, Artificial Sequence
  Description of Artificial Sequence: Synthetic peptide
  Seed: SIGKVCRTLLAKSVF
SIYKVVRSLLTKSVF

SEQ ID NO: 276580 - protein, 15 aa, Artificial Sequence
  Description of Artificial Sequence: Synthetic peptide
  Seed: SIGKVCRTLLAKSVF
SIYKVVRSLLVKSVF

SEQ ID NO: 276581 - protein, 15 aa, Artificial Sequence
  Description of Artificial Sequence: Synthetic peptide
  Seed: SIGKVCRTLLAKSVF
SIYKVVRTLLAKSVF

SEQ ID NO: 276582 - protein, 15 aa, Artificial Sequence
  Description of Artificial Sequence: Synthetic peptide
  Seed: SIGKVCRTLLAKSVF
SIYKVVRTLLDKSVF

SEQ ID NO: 276583 - protein, 15 aa, Artificial Sequence
  Description of Artificial Sequence: Synthetic peptide
  Seed: SIGKVCRTLLAKSVF
SIYKVVRTLLEKSVF

SEQ ID NO: 276584 - protein, 15 aa, Artificial Sequence
  Description of Artificial Sequence: Synthetic peptide
  Seed: SIGKVCRTLLAKSVF
SIYKVVRTLLGKSVF

SEQ ID NO: 276585 - protein, 15 aa, Artificial Sequence
  Description of Artificial Sequence: Synthetic peptide
  Seed: SIGKVCRTLLAKSVF
SIYKVVRTLLHKSVF

SEQ ID NO: 276586 - protein, 15 aa, Artificial Sequence
  Description of Artificial Sequence: Synthetic peptide
  Seed: SIGKVCRTLLAKSVF
SIYKVVRTLLKKSVF

SEQ ID NO: 276587 - protein, 15 aa, Artificial Sequence
  Description of Artificial Sequence: Synthetic peptide
  Seed: SIGKVCRTLLAKSVF
SIYKVVRTLLMKSVF

SEQ ID NO: 276588 - protein, 15 aa, Artificial Sequence
  Description of Artificial Sequence: Synthetic peptide
  Seed: SIGKVCRTLLAKSVF
SIYKVVRTLLNKSVF

SEQ ID NO: 276589 - protein, 15 aa, Artificial Sequence
  Description of Artificial Sequence: Synthetic peptide
  Seed: SIGKVCRTLLAKSVF
SIYKVVRTLLPKSVF

SEQ ID NO: 276590 - protein, 15 aa, Artificial Sequence
  Description of Artificial Sequence: Synthetic peptide
  Seed: SIGKVCRTLLAKSVF
SIYKVVRTLLQKSVF

SEQ ID NO: 276591 - protein, 15 aa, Artificial Sequence
  Description of Artificial Sequence: Synthetic peptide
  Seed: SIGKVCRTLLAKSVF
SIYKVVRTLLRKSVF

SEQ ID NO: 276592 - protein, 15 aa, Artificial Sequence
  Description of Artificial Sequence: Synthetic peptide
  Seed: SIGKVCRTLLAKSVF
SIYKVVRTLLSKSVF

SEQ ID NO: 276593 - protein, 15 aa, Artificial Sequence
  Description of Artificial Sequence: Synthetic peptide
  Seed: SIGKVCRTLLAKSVF
SIYKVVRTLLTKSVF

SEQ ID NO: 276594 - protein, 15 aa, Artificial Sequence
  Description of Artificial Sequence: Synthetic peptide
  Seed: SIGKVCRTLLAKSVF
SIYKVVRTLLVKSVF

SEQ ID NO: 276595 - protein, 15 aa, Artificial Sequence
  Description of Artificial Sequence: Synthetic peptide
  Seed: SIGKVCRTLLAKSVF
SIYKVVRVLLDKSVF

SEQ ID NO: 276596 - protein, 15 aa, Artificial Sequence
  Description of Artificial Sequence: Synthetic peptide
  Seed: SIGKVCRTLLAKSVF
SIYKVVRVLLEKSVF

SEQ ID NO: 276597 - protein, 15 aa, Artificial Sequence
  Description of Artificial Sequence: Synthetic peptide
  Seed: SIGKVCRTLLAKSVF
SIYKVVRVLLHKSVF

SEQ ID NO: 276598 - protein, 15 aa, Artificial Sequence
  Description of Artificial Sequence: Synthetic peptide
  Seed: SIGKVCRTLLAKSVF
SIYKVVRVLLKKSVF

SEQ ID NO: 276599 - protein, 15 aa, Artificial Sequence
  Description of Artificial Sequence: Synthetic peptide
  Seed: SIGKVCRTLLAKSVF
SIYKVVRVLLRKSVF

SEQ ID NO: 276600 - protein, 15 aa, Artificial Sequence
  Description of Artificial Sequence: Synthetic peptide
  Seed: SIGKVCRTLLAKSVF
SIYKVVRVLLSKSVF

SEQ ID NO: 276601 - protein, 15 aa, Artificial Sequence
  Description of Artificial Sequence: Synthetic peptide
  Seed: SIGKVCRTLLAKSVF
SIYKVWRALLAKSVF

SEQ ID NO: 276602 - protein, 15 aa, Artificial Sequence
  Description of Artificial Sequence: Synthetic peptide
  Seed: SIGKVCRTLLAKSVF
SIYKVWRALLGKSVF

SEQ ID NO: 276603 - protein, 15 aa, Artificial Sequence
  Description of Artificial Sequence: Synthetic peptide
  Seed: SIGKVCRTLLAKSVF
SIYKVWRALLHKSVF

SEQ ID NO: 276604 - protein, 15 aa, Artificial Sequence
  Description of Artificial Sequence: Synthetic peptide
  Seed: SIGKVCRTLLAKSVF
SIYKVWRALLQKSVF

SEQ ID NO: 276605 - protein, 15 aa, Artificial Sequence
  Description of Artificial Sequence: Synthetic peptide
  Seed: SIGKVCRTLLAKSVF
SIYKVWRALLRKSVF

SEQ ID NO: 276606 - protein, 15 aa, Artificial Sequence
  Description of Artificial Sequence: Synthetic peptide
  Seed: SIGKVCRTLLAKSVF
SIYKVWRALLSKSVF

SEQ ID NO: 276607 - protein, 15 aa, Artificial Sequence
  Description of Artificial Sequence: Synthetic peptide
  Seed: SIGKVCRTLLAKSVF
SIYKVWRGLLRKSVF

SEQ ID NO: 276608 - protein, 15 aa, Artificial Sequence
  Description of Artificial Sequence: Synthetic peptide
  Seed: SIGKVCRTLLAKSVF
SIYKVWRHLLAKSVF

SEQ ID NO: 276609 - protein, 15 aa, Artificial Sequence
  Description of Artificial Sequence: Synthetic peptide
  Seed: SIGKVCRTLLAKSVF
SIYKVWRHLLGKSVF

SEQ ID NO: 276610 - protein, 15 aa, Artificial Sequence
  Description of Artificial Sequence: Synthetic peptide
  Seed: SIGKVCRTLLAKSVF
SIYKVWRHLLHKSVF

SEQ ID NO: 276611 - protein, 15 aa, Artificial Sequence
  Description of Artificial Sequence: Synthetic peptide
  Seed: SIGKVCRTLLAKSVF
SIYKVWRHLLKKSVF

SEQ ID NO: 276612 - protein, 15 aa, Artificial Sequence
  Description of Artificial Sequence: Synthetic peptide
  Seed: SIGKVCRTLLAKSVF
SIYKVWRHLLQKSVF

SEQ ID NO: 276613 - protein, 15 aa, Artificial Sequence
  Description of Artificial Sequence: Synthetic peptide
  Seed: SIGKVCRTLLAKSVF
SIYKVWRHLLRKSVF

SEQ ID NO: 276614 - protein, 15 aa, Artificial Sequence
  Description of Artificial Sequence: Synthetic peptide
  Seed: SIGKVCRTLLAKSVF
SIYKVWRHLLSKSVF

SEQ ID NO: 276615 - protein, 15 aa, Artificial Sequence
  Description of Artificial Sequence: Synthetic peptide
  Seed: SIGKVCRTLLAKSVF
SIYKVWRHLLTKSVF

SEQ ID NO: 276616 - protein, 15 aa, Artificial Sequence
  Description of Artificial Sequence: Synthetic peptide
  Seed: SIGKVCRTLLAKSVF
SIYKVWRKLLAKSVF

SEQ ID NO: 276617 - protein, 15 aa, Artificial Sequence
  Description of Artificial Sequence: Synthetic peptide
  Seed: SIGKVCRTLLAKSVF
SIYKVWRKLLEKSVF

SEQ ID NO: 276618 - protein, 15 aa, Artificial Sequence
  Description of Artificial Sequence: Synthetic peptide
  Seed: SIGKVCRTLLAKSVF
SIYKVWRKLLGKSVF

SEQ ID NO: 276619 - protein, 15 aa, Artificial Sequence
  Description of Artificial Sequence: Synthetic peptide
  Seed: SIGKVCRTLLAKSVF
SIYKVWRKLLHKSVF

SEQ ID NO: 276620 - protein, 15 aa, Artificial Sequence
  Description of Artificial Sequence: Synthetic peptide
  Seed: SIGKVCRTLLAKSVF
SIYKVWRKLLIKSVF

SEQ ID NO: 276621 - protein, 15 aa, Artificial Sequence
  Description of Artificial Sequence: Synthetic peptide
  Seed: SIGKVCRTLLAKSVF
SIYKVWRKLLKKSVF

SEQ ID NO: 276622 - protein, 15 aa, Artificial Sequence
  Description of Artificial Sequence: Synthetic peptide
  Seed: SIGKVCRTLLAKSVF
SIYKVWRKLLLKSVF

SEQ ID NO: 276623 - protein, 15 aa, Artificial Sequence
  Description of Artificial Sequence: Synthetic peptide
  Seed: SIGKVCRTLLAKSVF
SIYKVWRKLLMKSVF

SEQ ID NO: 276624 - protein, 15 aa, Artificial Sequence
  Description of Artificial Sequence: Synthetic peptide
  Seed: SIGKVCRTLLAKSVF
SIYKVWRKLLNKSVF

SEQ ID NO: 276625 - protein, 15 aa, Artificial Sequence
  Description of Artificial Sequence: Synthetic peptide
  Seed: SIGKVCRTLLAKSVF
SIYKVWRKLLPKSVF

SEQ ID NO: 276626 - protein, 15 aa, Artificial Sequence
  Description of Artificial Sequence: Synthetic peptide
  Seed: SIGKVCRTLLAKSVF
SIYKVWRKLLQKSVF

SEQ ID NO: 276627 - protein, 15 aa, Artificial Sequence
  Description of Artificial Sequence: Synthetic peptide
  Seed: SIGKVCRTLLAKSVF
SIYKVWRKLLRKSVF

SEQ ID NO: 276628 - protein, 15 aa, Artificial Sequence
  Description of Artificial Sequence: Synthetic peptide
  Seed: SIGKVCRTLLAKSVF
SIYKVWRKLLSKSVF

SEQ ID NO: 276629 - protein, 15 aa, Artificial Sequence
  Description of Artificial Sequence: Synthetic peptide
  Seed: SIGKVCRTLLAKSVF
SIYKVWRKLLTKSVF

SEQ ID NO: 276630 - protein, 15 aa, Artificial Sequence
  Description of Artificial Sequence: Synthetic peptide
  Seed: SIGKVCRTLLAKSVF
SIYKVWRKLLVKSVF

SEQ ID NO: 276631 - protein, 15 aa, Artificial Sequence
  Description of Artificial Sequence: Synthetic peptide
  Seed: SIGKVCRTLLAKSVF
SIYKVWRKLLWKSVF

SEQ ID NO: 276632 - protein, 15 aa, Artificial Sequence
  Description of Artificial Sequence: Synthetic peptide
  Seed: SIGKVCRTLLAKSVF
SIYKVWRKLLYKSVF

SEQ ID NO: 276633 - protein, 15 aa, Artificial Sequence
  Description of Artificial Sequence: Synthetic peptide
  Seed: SIGKVCRTLLAKSVF
SIYKVWRNLLAKSVF

SEQ ID NO: 276634 - protein, 15 aa, Artificial Sequence
  Description of Artificial Sequence: Synthetic peptide
  Seed: SIGKVCRTLLAKSVF
SIYKVWRNLLKKSVF

SEQ ID NO: 276635 - protein, 15 aa, Artificial Sequence
  Description of Artificial Sequence: Synthetic peptide
  Seed: SIGKVCRTLLAKSVF
SIYKVWRNLLRKSVF

SEQ ID NO: 276636 - protein, 15 aa, Artificial Sequence
  Description of Artificial Sequence: Synthetic peptide
  Seed: SIGKVCRTLLAKSVF
SIYKVWRPLLAKSVF

SEQ ID NO: 276637 - protein, 15 aa, Artificial Sequence
  Description of Artificial Sequence: Synthetic peptide
  Seed: SIGKVCRTLLAKSVF
SIYKVWRPLLHKSVF

SEQ ID NO: 276638 - protein, 15 aa, Artificial Sequence
  Description of Artificial Sequence: Synthetic peptide
  Seed: SIGKVCRTLLAKSVF
SIYKVWRPLLRKSVF

SEQ ID NO: 276639 - protein, 15 aa, Artificial Sequence
  Description of Artificial Sequence: Synthetic peptide
  Seed: SIGKVCRTLLAKSVF
SIYKVWRPLLSKSVF

SEQ ID NO: 276640 - protein, 15 aa, Artificial Sequence
  Description of Artificial Sequence: Synthetic peptide
  Seed: SIGKVCRTLLAKSVF
SIYKVWRQLLKKSVF

SEQ ID NO: 276641 - protein, 15 aa, Artificial Sequence
  Description of Artificial Sequence: Synthetic peptide
  Seed: SIGKVCRTLLAKSVF
SIYKVWRQLLRKSVF

SEQ ID NO: 276642 - protein, 15 aa, Artificial Sequence
  Description of Artificial Sequence: Synthetic peptide
  Seed: SIGKVCRTLLAKSVF
SIYKVWRRLLAKSVF

SEQ ID NO: 276643 - protein, 15 aa, Artificial Sequence
  Description of Artificial Sequence: Synthetic peptide
  Seed: SIGKVCRTLLAKSVF
SIYKVWRRLLCKSVF

SEQ ID NO: 276644 - protein, 15 aa, Artificial Sequence
  Description of Artificial Sequence: Synthetic peptide
  Seed: SIGKVCRTLLAKSVF
SIYKVWRRLLDKSVF

SEQ ID NO: 276645 - protein, 15 aa, Artificial Sequence
  Description of Artificial Sequence: Synthetic peptide
  Seed: SIGKVCRTLLAKSVF
SIYKVWRRLLEKSVF

SEQ ID NO: 276646 - protein, 15 aa, Artificial Sequence
  Description of Artificial Sequence: Synthetic peptide
  Seed: SIGKVCRTLLAKSVF
SIYKVWRRLLFKSVF

SEQ ID NO: 276647 - protein, 15 aa, Artificial Sequence
  Description of Artificial Sequence: Synthetic peptide
  Seed: SIGKVCRTLLAKSVF
SIYKVWRRLLGKSVF

SEQ ID NO: 276648 - protein, 15 aa, Artificial Sequence
  Description of Artificial Sequence: Synthetic peptide
  Seed: SIGKVCRTLLAKSVF
SIYKVWRRLLHKSVF

SEQ ID NO: 276649 - protein, 15 aa, Artificial Sequence
  Description of Artificial Sequence: Synthetic peptide
  Seed: SIGKVCRTLLAKSVF
SIYKVWRRLLIKSVF

SEQ ID NO: 276650 - protein, 15 aa, Artificial Sequence
  Description of Artificial Sequence: Synthetic peptide
  Seed: SIGKVCRTLLAKSVF
SIYKVWRRLLKKSVF

SEQ ID NO: 276651 - protein, 15 aa, Artificial Sequence
  Description of Artificial Sequence: Synthetic peptide
  Seed: SIGKVCRTLLAKSVF
SIYKVWRRLLLKSVF

SEQ ID NO: 276652 - protein, 15 aa, Artificial Sequence
  Description of Artificial Sequence: Synthetic peptide
  Seed: SIGKVCRTLLAKSVF
SIYKVWRRLLMKSVF

SEQ ID NO: 276653 - protein, 15 aa, Artificial Sequence
  Description of Artificial Sequence: Synthetic peptide
  Seed: SIGKVCRTLLAKSVF
SIYKVWRRLLNKSVF

SEQ ID NO: 276654 - protein, 15 aa, Artificial Sequence
  Description of Artificial Sequence: Synthetic peptide
  Seed: SIGKVCRTLLAKSVF
SIYKVWRRLLPKSVF

SEQ ID NO: 276655 - protein, 15 aa, Artificial Sequence
  Description of Artificial Sequence: Synthetic peptide
  Seed: SIGKVCRTLLAKSVF
SIYKVWRRLLQKSVF

SEQ ID NO: 276656 - protein, 15 aa, Artificial Sequence
  Description of Artificial Sequence: Synthetic peptide
  Seed: SIGKVCRTLLAKSVF
SIYKVWRRLLRKSVF

SEQ ID NO: 276657 - protein, 15 aa, Artificial Sequence
  Description of Artificial Sequence: Synthetic peptide
  Seed: SIGKVCRTLLAKSVF
SIYKVWRRLLSKSVF

SEQ ID NO: 276658 - protein, 15 aa, Artificial Sequence
  Description of Artificial Sequence: Synthetic peptide
  Seed: SIGKVCRTLLAKSVF
SIYKVWRRLLTKSVF

SEQ ID NO: 276659 - protein, 15 aa, Artificial Sequence
  Description of Artificial Sequence: Synthetic peptide
  Seed: SIGKVCRTLLAKSVF
SIYKVWRRLLVKSVF

SEQ ID NO: 276660 - protein, 15 aa, Artificial Sequence
  Description of Artificial Sequence: Synthetic peptide
  Seed: SIGKVCRTLLAKSVF
SIYKVWRRLLWKSVF

SEQ ID NO: 276661 - protein, 15 aa, Artificial Sequence
  Description of Artificial Sequence: Synthetic peptide
  Seed: SIGKVCRTLLAKSVF
SIYKVWRRLLYKSVF

SEQ ID NO: 276662 - protein, 15 aa, Artificial Sequence
  Description of Artificial Sequence: Synthetic peptide
  Seed: SIGKVCRTLLAKSVF
SIYKVWRSLLAKSVF

SEQ ID NO: 276663 - protein, 15 aa, Artificial Sequence
  Description of Artificial Sequence: Synthetic peptide
  Seed: SIGKVCRTLLAKSVF
SIYKVWRSLLHKSVF

SEQ ID NO: 276664 - protein, 15 aa, Artificial Sequence
  Description of Artificial Sequence: Synthetic peptide
  Seed: SIGKVCRTLLAKSVF
SIYKVWRSLLKKSVF

SEQ ID NO: 276665 - protein, 15 aa, Artificial Sequence
  Description of Artificial Sequence: Synthetic peptide
  Seed: SIGKVCRTLLAKSVF
SIYKVWRSLLRKSVF

SEQ ID NO: 276666 - protein, 15 aa, Artificial Sequence
  Description of Artificial Sequence: Synthetic peptide
  Seed: SIGKVCRTLLAKSVF
SIYKVWRSLLSKSVF

SEQ ID NO: 276667 - protein, 15 aa, Artificial Sequence
  Description of Artificial Sequence: Synthetic peptide
  Seed: SIGKVCRTLLAKSVF
SIYKVWRTLLAKSVF

SEQ ID NO: 276668 - protein, 15 aa, Artificial Sequence
  Description of Artificial Sequence: Synthetic peptide
  Seed: SIGKVCRTLLAKSVF
SIYKVWRTLLHKSVF

SEQ ID NO: 276669 - protein, 15 aa, Artificial Sequence
  Description of Artificial Sequence: Synthetic peptide
  Seed: SIGKVCRTLLAKSVF
SIYKVWRTLLKKSVF

SEQ ID NO: 276670 - protein, 15 aa, Artificial Sequence
  Description of Artificial Sequence: Synthetic peptide
  Seed: SIGKVCRTLLAKSVF
SIYKVWRTLLRKSVF

SEQ ID NO: 276671 - protein, 15 aa, Artificial Sequence
  Description of Artificial Sequence: Synthetic peptide
  Seed: SIGKVCRTLLAKSVF
SIYKVWRTLLSKSVF

SEQ ID NO: 276672 - protein, 15 aa, Artificial Sequence
  Description of Artificial Sequence: Synthetic peptide
  Seed: SIGKVCRTLLAKSVF
SIYKVWRVLLRKSVF

SEQ ID NO: 276673 - protein, 15 aa, Artificial Sequence
  Description of Artificial Sequence: Synthetic peptide
  Seed: SIGKVCRTLLAKSVF
SIYKVYRALLAKSVF

SEQ ID NO: 276674 - protein, 15 aa, Artificial Sequence
  Description of Artificial Sequence: Synthetic peptide
  Seed: SIGKVCRTLLAKSVF
SIYKVYRALLHKSVF

SEQ ID NO: 276675 - protein, 15 aa, Artificial Sequence
  Description of Artificial Sequence: Synthetic peptide
  Seed: SIGKVCRTLLAKSVF
SIYKVYRALLSKSVF

SEQ ID NO: 276676 - protein, 15 aa, Artificial Sequence
  Description of Artificial Sequence: Synthetic peptide
  Seed: SIGKVCRTLLAKSVF
SIYKVYRHLLAKSVF

SEQ ID NO: 276677 - protein, 15 aa, Artificial Sequence
  Description of Artificial Sequence: Synthetic peptide
  Seed: SIGKVCRTLLAKSVF
SIYKVYRHLLGKSVF

SEQ ID NO: 276678 - protein, 15 aa, Artificial Sequence
  Description of Artificial Sequence: Synthetic peptide
  Seed: SIGKVCRTLLAKSVF
SIYKVYRHLLHKSVF

SEQ ID NO: 276679 - protein, 15 aa, Artificial Sequence
  Description of Artificial Sequence: Synthetic peptide
  Seed: SIGKVCRTLLAKSVF
SIYKVYRHLLQKSVF

SEQ ID NO: 276680 - protein, 15 aa, Artificial Sequence
  Description of Artificial Sequence: Synthetic peptide
  Seed: SIGKVCRTLLAKSVF
SIYKVYRHLLRKSVF

SEQ ID NO: 276681 - protein, 15 aa, Artificial Sequence
  Description of Artificial Sequence: Synthetic peptide
  Seed: SIGKVCRTLLAKSVF
SIYKVYRHLLSKSVF

SEQ ID NO: 276682 - protein, 15 aa, Artificial Sequence
  Description of Artificial Sequence: Synthetic peptide
  Seed: SIGKVCRTLLAKSVF
SIYKVYRHLLTKSVF

SEQ ID NO: 276683 - protein, 15 aa, Artificial Sequence
  Description of Artificial Sequence: Synthetic peptide
  Seed: SIGKVCRTLLAKSVF
SIYKVYRKLLAKSVF

SEQ ID NO: 276684 - protein, 15 aa, Artificial Sequence
  Description of Artificial Sequence: Synthetic peptide
  Seed: SIGKVCRTLLAKSVF
SIYKVYRKLLGKSVF

SEQ ID NO: 276685 - protein, 15 aa, Artificial Sequence
  Description of Artificial Sequence: Synthetic peptide
  Seed: SIGKVCRTLLAKSVF
SIYKVYRKLLHKSVF

SEQ ID NO: 276686 - protein, 15 aa, Artificial Sequence
  Description of Artificial Sequence: Synthetic peptide
  Seed: SIGKVCRTLLAKSVF
SIYKVYRKLLIKSVF

SEQ ID NO: 276687 - protein, 15 aa, Artificial Sequence
  Description of Artificial Sequence: Synthetic peptide
  Seed: SIGKVCRTLLAKSVF
SIYKVYRKLLKKSVF

SEQ ID NO: 276688 - protein, 15 aa, Artificial Sequence
  Description of Artificial Sequence: Synthetic peptide
  Seed: SIGKVCRTLLAKSVF
SIYKVYRKLLLKSVF

SEQ ID NO: 276689 - protein, 15 aa, Artificial Sequence
  Description of Artificial Sequence: Synthetic peptide
  Seed: SIGKVCRTLLAKSVF
SIYKVYRKLLMKSVF

SEQ ID NO: 276690 - protein, 15 aa, Artificial Sequence
  Description of Artificial Sequence: Synthetic peptide
  Seed: SIGKVCRTLLAKSVF
SIYKVYRKLLNKSVF

SEQ ID NO: 276691 - protein, 15 aa, Artificial Sequence
  Description of Artificial Sequence: Synthetic peptide
  Seed: SIGKVCRTLLAKSVF
SIYKVYRKLLPKSVF

SEQ ID NO: 276692 - protein, 15 aa, Artificial Sequence
  Description of Artificial Sequence: Synthetic peptide
  Seed: SIGKVCRTLLAKSVF
SIYKVYRKLLQKSVF

SEQ ID NO: 276693 - protein, 15 aa, Artificial Sequence
  Description of Artificial Sequence: Synthetic peptide
  Seed: SIGKVCRTLLAKSVF
SIYKVYRKLLRKSVF

SEQ ID NO: 276694 - protein, 15 aa, Artificial Sequence
  Description of Artificial Sequence: Synthetic peptide
  Seed: SIGKVCRTLLAKSVF
SIYKVYRKLLSKSVF

SEQ ID NO: 276695 - protein, 15 aa, Artificial Sequence
  Description of Artificial Sequence: Synthetic peptide
  Seed: SIGKVCRTLLAKSVF
SIYKVYRKLLTKSVF

SEQ ID NO: 276696 - protein, 15 aa, Artificial Sequence
  Description of Artificial Sequence: Synthetic peptide
  Seed: SIGKVCRTLLAKSVF
SIYKVYRKLLVKSVF

SEQ ID NO: 276697 - protein, 15 aa, Artificial Sequence
  Description of Artificial Sequence: Synthetic peptide
  Seed: SIGKVCRTLLAKSVF
SIYKVYRKLLYKSVF

SEQ ID NO: 276698 - protein, 15 aa, Artificial Sequence
  Description of Artificial Sequence: Synthetic peptide
  Seed: SIGKVCRTLLAKSVF
SIYKVYRNLLRKSVF

SEQ ID NO: 276699 - protein, 15 aa, Artificial Sequence
  Description of Artificial Sequence: Synthetic peptide
  Seed: SIGKVCRTLLAKSVF
SIYKVYRQLLRKSVF

SEQ ID NO: 276700 - protein, 15 aa, Artificial Sequence
  Description of Artificial Sequence: Synthetic peptide
  Seed: SIGKVCRTLLAKSVF
SIYKVYRRLLAKSVF

SEQ ID NO: 276701 - protein, 15 aa, Artificial Sequence
  Description of Artificial Sequence: Synthetic peptide
  Seed: SIGKVCRTLLAKSVF
SIYKVYRRLLDKSVF

SEQ ID NO: 276702 - protein, 15 aa, Artificial Sequence
  Description of Artificial Sequence: Synthetic peptide
  Seed: SIGKVCRTLLAKSVF
SIYKVYRRLLEKSVF

SEQ ID NO: 276703 - protein, 15 aa, Artificial Sequence
  Description of Artificial Sequence: Synthetic peptide
  Seed: SIGKVCRTLLAKSVF
SIYKVYRRLLFKSVF

SEQ ID NO: 276704 - protein, 15 aa, Artificial Sequence
  Description of Artificial Sequence: Synthetic peptide
  Seed: SIGKVCRTLLAKSVF
SIYKVYRRLLGKSVF

SEQ ID NO: 276705 - protein, 15 aa, Artificial Sequence
  Description of Artificial Sequence: Synthetic peptide
  Seed: SIGKVCRTLLAKSVF
SIYKVYRRLLHKSVF

SEQ ID NO: 276706 - protein, 15 aa, Artificial Sequence
  Description of Artificial Sequence: Synthetic peptide
  Seed: SIGKVCRTLLAKSVF
SIYKVYRRLLIKSVF

SEQ ID NO: 276707 - protein, 15 aa, Artificial Sequence
  Description of Artificial Sequence: Synthetic peptide
  Seed: SIGKVCRTLLAKSVF
SIYKVYRRLLKKSVF

SEQ ID NO: 276708 - protein, 15 aa, Artificial Sequence
  Description of Artificial Sequence: Synthetic peptide
  Seed: SIGKVCRTLLAKSVF
SIYKVYRRLLLKSVF

SEQ ID NO: 276709 - protein, 15 aa, Artificial Sequence
  Description of Artificial Sequence: Synthetic peptide
  Seed: SIGKVCRTLLAKSVF
SIYKVYRRLLMKSVF

SEQ ID NO: 276710 - protein, 15 aa, Artificial Sequence
  Description of Artificial Sequence: Synthetic peptide
  Seed: SIGKVCRTLLAKSVF
SIYKVYRRLLNKSVF

SEQ ID NO: 276711 - protein, 15 aa, Artificial Sequence
  Description of Artificial Sequence: Synthetic peptide
  Seed: SIGKVCRTLLAKSVF
SIYKVYRRLLPKSVF

SEQ ID NO: 276712 - protein, 15 aa, Artificial Sequence
  Description of Artificial Sequence: Synthetic peptide
  Seed: SIGKVCRTLLAKSVF
SIYKVYRRLLQKSVF

SEQ ID NO: 276713 - protein, 15 aa, Artificial Sequence
  Description of Artificial Sequence: Synthetic peptide
  Seed: SIGKVCRTLLAKSVF
SIYKVYRRLLRKSVF

SEQ ID NO: 276714 - protein, 15 aa, Artificial Sequence
  Description of Artificial Sequence: Synthetic peptide
  Seed: SIGKVCRTLLAKSVF
SIYKVYRRLLSKSVF

SEQ ID NO: 276715 - protein, 15 aa, Artificial Sequence
  Description of Artificial Sequence: Synthetic peptide
  Seed: SIGKVCRTLLAKSVF
SIYKVYRRLLTKSVF

SEQ ID NO: 276716 - protein, 15 aa, Artificial Sequence
  Description of Artificial Sequence: Synthetic peptide
  Seed: SIGKVCRTLLAKSVF
SIYKVYRRLLVKSVF

SEQ ID NO: 276717 - protein, 15 aa, Artificial Sequence
  Description of Artificial Sequence: Synthetic peptide
  Seed: SIGKVCRTLLAKSVF
SIYKVYRRLLYKSVF

SEQ ID NO: 276718 - protein, 15 aa, Artificial Sequence
  Description of Artificial Sequence: Synthetic peptide
  Seed: SIGKVCRTLLAKSVF
SIYKVYRSLLDKSVF

SEQ ID NO: 276719 - protein, 15 aa, Artificial Sequence
  Description of Artificial Sequence: Synthetic peptide
  Seed: SIGKVCRTLLAKSVF
SIYKVYRSLLHKSVF

SEQ ID NO: 276720 - protein, 15 aa, Artificial Sequence
  Description of Artificial Sequence: Synthetic peptide
  Seed: SIGKVCRTLLAKSVF
SIYKVYRSLLRKSVF

SEQ ID NO: 276721 - protein, 15 aa, Artificial Sequence
  Description of Artificial Sequence: Synthetic peptide
  Seed: SIGKVCRTLLAKSVF
SIYKVYRTLLDKSVF

SEQ ID NO: 276722 - protein, 15 aa, Artificial Sequence
  Description of Artificial Sequence: Synthetic peptide
  Seed: SIGKVCRTLLAKSVF
SIYKVYRTLLHKSVF

SEQ ID NO: 276723 - protein, 15 aa, Artificial Sequence
  Description of Artificial Sequence: Synthetic peptide
  Seed: SIGKVCRTLLAKSVF
SIYKVYRTLLRKSVF

SEQ ID NO: 276724 - protein, 15 aa, Artificial Sequence
  Description of Artificial Sequence: Synthetic peptide
  Seed: SIGKVCRTLLAKSVF
SIGKFCRALFAKIVF

SEQ ID NO: 276725 - protein, 15 aa, Artificial Sequence
  Description of Artificial Sequence: Synthetic peptide
  Seed: SIGKVCRTLLAKSVF
SIGKFCRALFAKLVF

SEQ ID NO: 276726 - protein, 15 aa, Artificial Sequence
  Description of Artificial Sequence: Synthetic peptide
  Seed: SIGKVCRTLLAKSVF
SIGKFCRELFAKIVF

SEQ ID NO: 276727 - protein, 15 aa, Artificial Sequence
  Description of Artificial Sequence: Synthetic peptide
  Seed: SIGKVCRTLLAKSVF
SIGKFCRELFAKLVF

SEQ ID NO: 276728 - protein, 15 aa, Artificial Sequence
  Description of Artificial Sequence: Synthetic peptide
  Seed: SIGKVCRTLLAKSVF
SIGKFCRELFAKVVF

SEQ ID NO: 276729 - protein, 15 aa, Artificial Sequence
  Description of Artificial Sequence: Synthetic peptide
  Seed: SIGKVCRTLLAKSVF
SIGKFCRILKAKDVF

SEQ ID NO: 276730 - protein, 15 aa, Artificial Sequence
  Description of Artificial Sequence: Synthetic peptide
  Seed: SIGKVCRTLLAKSVF
SIGKFCRILRAKDVF

SEQ ID NO: 276731 - protein, 15 aa, Artificial Sequence
  Description of Artificial Sequence: Synthetic peptide
  Seed: SIGKVCRTLLAKSVF
SIGKFCRSLFAKFVF

SEQ ID NO: 276732 - protein, 15 aa, Artificial Sequence
  Description of Artificial Sequence: Synthetic peptide
  Seed: SIGKVCRTLLAKSVF
SIGKFCRSLFAKIVF

SEQ ID NO: 276733 - protein, 15 aa, Artificial Sequence
  Description of Artificial Sequence: Synthetic peptide
  Seed: SIGKVCRTLLAKSVF
SIGKFCRSLFAKLVF

SEQ ID NO: 276734 - protein, 15 aa, Artificial Sequence
  Description of Artificial Sequence: Synthetic peptide
  Seed: SIGKVCRTLLAKSVF
SIGKFCRSLFAKMVF

SEQ ID NO: 276735 - protein, 15 aa, Artificial Sequence
  Description of Artificial Sequence: Synthetic peptide
  Seed: SIGKVCRTLLAKSVF
SIGKFCRSLFAKVVF

SEQ ID NO: 276736 - protein, 15 aa, Artificial Sequence
  Description of Artificial Sequence: Synthetic peptide
  Seed: SIGKVCRTLLAKSVF
SIGKFCRTLFAKFVF

SEQ ID NO: 276737 - protein, 15 aa, Artificial Sequence
  Description of Artificial Sequence: Synthetic peptide
  Seed: SIGKVCRTLLAKSVF
SIGKFCRTLFAKIVF

SEQ ID NO: 276738 - protein, 15 aa, Artificial Sequence
  Description of Artificial Sequence: Synthetic peptide
  Seed: SIGKVCRTLLAKSVF
SIGKFCRTLFAKLVF

SEQ ID NO: 276739 - protein, 15 aa, Artificial Sequence
  Description of Artificial Sequence: Synthetic peptide
  Seed: SIGKVCRTLLAKSVF
SIGKFCRTLFAKMVF

SEQ ID NO: 276740 - protein, 15 aa, Artificial Sequence
  Description of Artificial Sequence: Synthetic peptide
  Seed: SIGKVCRTLLAKSVF
SIGKFCRTLFAKVVF

SEQ ID NO: 276741 - protein, 15 aa, Artificial Sequence
  Description of Artificial Sequence: Synthetic peptide
  Seed: SIGKVCRTLLAKSVF
SIGKICRALRAKVVF

SEQ ID NO: 276742 - protein, 15 aa, Artificial Sequence
  Description of Artificial Sequence: Synthetic peptide
  Seed: SIGKVCRTLLAKSVF
SIGKICRILKAKVVF

SEQ ID NO: 276743 - protein, 15 aa, Artificial Sequence
  Description of Artificial Sequence: Synthetic peptide
  Seed: SIGKVCRTLLAKSVF
SIGKICRILRAKAVF

SEQ ID NO: 276744 - protein, 15 aa, Artificial Sequence
  Description of Artificial Sequence: Synthetic peptide
  Seed: SIGKVCRTLLAKSVF
SIGKICRILRAKIVF

SEQ ID NO: 276745 - protein, 15 aa, Artificial Sequence
  Description of Artificial Sequence: Synthetic peptide
  Seed: SIGKVCRTLLAKSVF
SIGKICRILRAKMVF

SEQ ID NO: 276746 - protein, 15 aa, Artificial Sequence
  Description of Artificial Sequence: Synthetic peptide
  Seed: SIGKVCRTLLAKSVF
SIGKICRILRAKSVF

SEQ ID NO: 276747 - protein, 15 aa, Artificial Sequence
  Description of Artificial Sequence: Synthetic peptide
  Seed: SIGKVCRTLLAKSVF
SIGKICRILRAKVVF

SEQ ID NO: 276748 - protein, 15 aa, Artificial Sequence
  Description of Artificial Sequence: Synthetic peptide
  Seed: SIGKVCRTLLAKSVF
SIGKICRLLRAKAVF

SEQ ID NO: 276749 - protein, 15 aa, Artificial Sequence
  Description of Artificial Sequence: Synthetic peptide
  Seed: SIGKVCRTLLAKSVF
SIGKICRLLRAKVVF

SEQ ID NO: 276750 - protein, 15 aa, Artificial Sequence
  Description of Artificial Sequence: Synthetic peptide
  Seed: SIGKVCRTLLAKSVF
SIGKICRMLRAKAVF

SEQ ID NO: 276751 - protein, 15 aa, Artificial Sequence
  Description of Artificial Sequence: Synthetic peptide
  Seed: SIGKVCRTLLAKSVF
SIGKICRMLRAKIVF

SEQ ID NO: 276752 - protein, 15 aa, Artificial Sequence
  Description of Artificial Sequence: Synthetic peptide
  Seed: SIGKVCRTLLAKSVF
SIGKICRMLRAKMVF

SEQ ID NO: 276753 - protein, 15 aa, Artificial Sequence
  Description of Artificial Sequence: Synthetic peptide
  Seed: SIGKVCRTLLAKSVF
SIGKICRMLRAKRVF

SEQ ID NO: 276754 - protein, 15 aa, Artificial Sequence
  Description of Artificial Sequence: Synthetic peptide
  Seed: SIGKVCRTLLAKSVF
SIGKICRMLRAKVVF

SEQ ID NO: 276755 - protein, 15 aa, Artificial Sequence
  Description of Artificial Sequence: Synthetic peptide
  Seed: SIGKVCRTLLAKSVF
SIGKICRVLRAKAVF

SEQ ID NO: 276756 - protein, 15 aa, Artificial Sequence
  Description of Artificial Sequence: Synthetic peptide
  Seed: SIGKVCRTLLAKSVF
SIGKICRVLRAKVVF

SEQ ID NO: 276757 - protein, 15 aa, Artificial Sequence
  Description of Artificial Sequence: Synthetic peptide
  Seed: SIGKVCRTLLAKSVF
SIGKYCRTLFAKLVF

SEQ ID NO: 276758 - protein, 15 aa, Artificial Sequence
  Description of Artificial Sequence: Synthetic peptide
  Seed: SIGKVCRTLLAKSVF
SIIKVMRMLLTKSVF

SEQ ID NO: 276759 - protein, 15 aa, Artificial Sequence
  Description of Artificial Sequence: Synthetic peptide
  Seed: DPWVLLNASWFNSFL
DPWVLLNMSLFNRFL

SEQ ID NO: 276760 - protein, 15 aa, Artificial Sequence
  Description of Artificial Sequence: Synthetic peptide
  Seed: DPWVLLNASWFNSFL
DPWVLMNAYWINSVL

SEQ ID NO: 276761 - protein, 15 aa, Artificial Sequence
  Description of Artificial Sequence: Synthetic peptide
  Seed: SIGKVCRTLLAKSVF
SITKVIRTLLSKSVF

SEQ ID NO: 276762 - protein, 15 aa, Artificial Sequence
  Description of Artificial Sequence: Synthetic peptide
  Seed: SIGKVCRTLLAKSVF
SIGKVARTGLAKSSF

SEQ ID NO: 276763 - protein, 15 aa, Artificial Sequence
  Description of Artificial Sequence: Synthetic peptide
  Seed: SIGKVCRTLLAKSVF
SIVKVFRNLLTKSVF

SEQ ID NO: 276764 - protein, 15 aa, Artificial Sequence
  Description of Artificial Sequence: Synthetic peptide
  Seed: SIGKVCRTLLAKSVF
SIFKVFRALLTKSVF

SEQ ID NO: 276765 - protein, 15 aa, Artificial Sequence
  Description of Artificial Sequence: Synthetic peptide
  Seed: SIGKVCRTLLAKSVF
SIIKVYRTLLTKSVF

SEQ ID NO: 276766 - protein, 15 aa, Artificial Sequence
  Description of Artificial Sequence: Synthetic peptide
  Seed: SIGKVCRTLLAKSVF
SIYKVFRALLTKSVF

SEQ ID NO: 276767 - protein, 15 aa, Artificial Sequence
  Description of Artificial Sequence: Synthetic peptide
  Seed: SIGKVCRTLLAKSVF
SIYKVIRMLLNKSVF

SEQ ID NO: 276768 - protein, 15 aa, Artificial Sequence
  Description of Artificial Sequence: Synthetic peptide
  Seed: SIGKVCRTLLAKSVF
SIGKMCRILIAKRVF

SEQ ID NO: 276769 - protein, 15 aa, Artificial Sequence
  Description of Artificial Sequence: Synthetic peptide
  Seed: SIGKVCRTLLAKSVF
SIYKVLRVLLTKSVF

SEQ ID NO: 276770 - protein, 15 aa, Artificial Sequence
  Description of Artificial Sequence: Synthetic peptide
  Seed: DPWVLLNASWFNSFL
DPHVLMNASWLNSFL

SEQ ID NO: 276771 - protein, 15 aa, Artificial Sequence
  Description of Artificial Sequence: Synthetic peptide
  Seed: SIGKVCRTLLAKSVF
SIFKVFRSLLPKSVF

SEQ ID NO: 276772 - protein, 15 aa, Artificial Sequence
  Description of Artificial Sequence: Synthetic peptide
  Seed: SIGKVCRTLLAKSVF
SIMKVFRALLTKSVF

SEQ ID NO: 276773 - protein, 15 aa, Artificial Sequence
  Description of Artificial Sequence: Synthetic peptide
  Seed: DPWVLLNASWFNSFL
DPWVLFNARWINSLL

SEQ ID NO: 276774 - protein, 15 aa, Artificial Sequence
  Description of Artificial Sequence: Synthetic peptide
  Seed: SIGKVCRTLLAKSVF
SIFKVVRALLPKSVF

SEQ ID NO: 276775 - protein, 15 aa, Artificial Sequence
  Description of Artificial Sequence: Synthetic peptide
  Seed: SIGKVCRTLLAKSVF
SIFKVLRILLSKSVF

SEQ ID NO: 276776 - protein, 15 aa, Artificial Sequence
  Description of Artificial Sequence: Synthetic peptide
  Seed: SIGKVCRTLLAKSVF
SIMKVFRILLSKSVF

SEQ ID NO: 276777 - protein, 15 aa, Artificial Sequence
  Description of Artificial Sequence: Synthetic peptide
  Seed: SIGKVCRTLLAKSVF
SIYKVFRILLSKSVF

SEQ ID NO: 276778 - protein, 15 aa, Artificial Sequence
  Description of Artificial Sequence: Synthetic peptide
  Seed: SIGKVCRTLLAKSVF
SIFKVWRALLTKSVF

SEQ ID NO: 276779 - protein, 15 aa, Artificial Sequence
  Description of Artificial Sequence: Synthetic peptide
  Seed: SIGKVCRTLLAKSVF
SIIKVFRVLLSKSVF

SEQ ID NO: 276780 - protein, 15 aa, Artificial Sequence
  Description of Artificial Sequence: Synthetic peptide
  Seed: SIGKVCRTLLAKSVF
SIVKVFRALLTKSVF

SEQ ID NO: 276781 - protein, 15 aa, Artificial Sequence
  Description of Artificial Sequence: Synthetic peptide
  Seed: SIGKVCRTLLAKSVF
SIYKVFRSLLPKSVF

SEQ ID NO: 276782 - protein, 15 aa, Artificial Sequence
  Description of Artificial Sequence: Synthetic peptide
  Seed: SIGKVCRTLLAKSVF
SIMKVYRVLLSKSVF

SEQ ID NO: 276783 - protein, 15 aa, Artificial Sequence
  Description of Artificial Sequence: Synthetic peptide
  Seed: SIGKVCRTLLAKSVF
SIVKVWRVLLSKSVF

SEQ ID NO: 276784 - protein, 15 aa, Artificial Sequence
  Description of Artificial Sequence: Synthetic peptide
  Seed: SIGKVCRTLLAKSVF
SILKVFRVLLSKSVF

SEQ ID NO: 276785 - protein, 15 aa, Artificial Sequence
  Description of Artificial Sequence: Synthetic peptide
  Seed: SIGKVCRTLLAKSVF
SIYKVYRSLLTKSVF

SEQ ID NO: 276786 - protein, 15 aa, Artificial Sequence
  Description of Artificial Sequence: Synthetic peptide
  Seed: DPWVLLNASWFNSFL
DPWVFLNTSLFNSFL

SEQ ID NO: 276787 - protein, 15 aa, Artificial Sequence
  Description of Artificial Sequence: Synthetic peptide
  Seed: SIGKVCRTLLAKSVF
SIFKVIRVLLPKSVF

SEQ ID NO: 276788 - protein, 15 aa, Artificial Sequence
  Description of Artificial Sequence: Synthetic peptide
  Seed: SIGKVCRTLLAKSVF
SIGKVMRSLLSKSVF

SEQ ID NO: 276789 - protein, 15 aa, Artificial Sequence
  Description of Artificial Sequence: Synthetic peptide
  Seed: SIGKVCRTLLAKSVF
SIYKVWRSLLGKSVF

SEQ ID NO: 276790 - protein, 15 aa, Artificial Sequence
  Description of Artificial Sequence: Synthetic peptide
  Seed: SIGKVCRTLLAKSVF
SIVKVYRSLLTKSVF

SEQ ID NO: 276791 - protein, 15 aa, Artificial Sequence
  Description of Artificial Sequence: Synthetic peptide
  Seed: DPWVLLNASWFNSFL
DPMVLINPSWNNSFL

SEQ ID NO: 276792 - protein, 15 aa, Artificial Sequence
  Description of Artificial Sequence: Synthetic peptide
  Seed: SIGKVCRTLLAKSVF
SIMKVYRALLTKSVF

SEQ ID NO: 276793 - protein, 15 aa, Artificial Sequence
  Description of Artificial Sequence: Synthetic peptide
  Seed: SIGKVCRTLLAKSVF
SIYKVTRVLLHKSVF

SEQ ID NO: 276794 - protein, 15 aa, Artificial Sequence
  Description of Artificial Sequence: Synthetic peptide
  Seed: SIGKVCRTLLAKSVF
SIWKVVRSLLTKSVF

SEQ ID NO: 276795 - protein, 15 aa, Artificial Sequence
  Description of Artificial Sequence: Synthetic peptide
  Seed: SIGKVCRTLLAKSVF
SIFKVFRALLPKSVF

SEQ ID NO: 276796 - protein, 15 aa, Artificial Sequence
  Description of Artificial Sequence: Synthetic peptide
  Seed: SIGKVCRTLLAKSVF
SIVKVYRTLLNKSVF

SEQ ID NO: 276797 - protein, 15 aa, Artificial Sequence
  Description of Artificial Sequence: Synthetic peptide
  Seed: SIGKVCRTLLAKSVF
SIYKVFRALLPKSVF

SEQ ID NO: 276798 - protein, 15 aa, Artificial Sequence
  Description of Artificial Sequence: Synthetic peptide
  Seed: SIGKVCRTLLAKSVF
SIGKWCRTLRAKSVF

SEQ ID NO: 276799 - protein, 15 aa, Artificial Sequence
  Description of Artificial Sequence: Synthetic peptide
  Seed: DPWVLLNASWFNSFL
DPWMLLRANWFRSFL

SEQ ID NO: 276800 - protein, 15 aa, Artificial Sequence
  Description of Artificial Sequence: Synthetic peptide
  Seed: SIGKVCRTLLAKSVF
SIYKVFRGLLTKSVF

SEQ ID NO: 276801 - protein, 15 aa, Artificial Sequence
  Description of Artificial Sequence: Synthetic peptide
  Seed: SIGKVCRTLLAKSVF
SIYKVARPLLLKSVF

SEQ ID NO: 276802 - protein, 15 aa, Artificial Sequence
  Description of Artificial Sequence: Synthetic peptide
  Seed: SIGKVCRTLLAKSVF
SIHKVFRSLLAKSVF

SEQ ID NO: 276803 - protein, 15 aa, Artificial Sequence
  Description of Artificial Sequence: Synthetic peptide
  Seed: DPWVLLNASWFNSFL
DPFVLINTSWPNSFL

SEQ ID NO: 276804 - protein, 15 aa, Artificial Sequence
  Description of Artificial Sequence: Synthetic peptide
  Seed: SIGKVCRTLLAKSVF
SIWKVYRSLLSKSVF

SEQ ID NO: 276805 - protein, 15 aa, Artificial Sequence
  Description of Artificial Sequence: Synthetic peptide
  Seed: SIGKVCRTLLAKSVF
SIFKVQRTLLFKSVF

SEQ ID NO: 276806 - protein, 15 aa, Artificial Sequence
  Description of Artificial Sequence: Synthetic peptide
  Seed: SIGKVCRTLLAKSVF
SIFKVSRALLEKSVF

SEQ ID NO: 276807 - protein, 15 aa, Artificial Sequence
  Description of Artificial Sequence: Synthetic peptide
  Seed: SIGKVCRTLLAKSVF
SIWKVIRSLLVKSVF

SEQ ID NO: 276808 - protein, 15 aa, Artificial Sequence
  Description of Artificial Sequence: Synthetic peptide
  Seed: SIGKVCRTLLAKSVF
SIIKVSRNLLNKSVF

SEQ ID NO: 276809 - protein, 15 aa, Artificial Sequence
  Description of Artificial Sequence: Synthetic peptide
  Seed: SIGKVCRTLLAKSVF
SIGKVRRTTLFKSLF

SEQ ID NO: 276810 - protein, 15 aa, Artificial Sequence
  Description of Artificial Sequence: Synthetic peptide
  Seed: SIGKVCRTLLAKSVF
SIGKVRRTTLFKSIF

SEQ ID NO: 276811 - protein, 15 aa, Artificial Sequence
  Description of Artificial Sequence: Synthetic peptide
  Seed: SIGKVCRTLLAKSVF
SIGKVFRTALFKSRF

SEQ ID NO: 276812 - protein, 15 aa, Artificial Sequence
  Description of Artificial Sequence: Synthetic peptide
  Seed: SIGKVCRTLLAKSVF
SIWKVIRTLLMKSVF

SEQ ID NO: 276813 - protein, 15 aa, Artificial Sequence
  Description of Artificial Sequence: Synthetic peptide
  Seed: SIGKVCRTLLAKSVF
SIFKVCRSLLEKSVF

SEQ ID NO: 276814 - protein, 15 aa, Artificial Sequence
  Description of Artificial Sequence: Synthetic peptide
  Seed: SIGKVCRTLLAKSVF
SIGKVLRTTLFKSRF

SEQ ID NO: 276815 - protein, 15 aa, Artificial Sequence
  Description of Artificial Sequence: Synthetic peptide
  Seed: SIGKVCRTLLAKSVF
SIGKFCRMLKAKAVF

SEQ ID NO: 276816 - protein, 15 aa, Artificial Sequence
  Description of Artificial Sequence: Synthetic peptide
  Seed: SIGKVCRTLLAKSVF
SIGKVRRTILFKSVF

SEQ ID NO: 276817 - protein, 15 aa, Artificial Sequence
  Description of Artificial Sequence: Synthetic peptide
  Seed: SIGKVCRTLLAKSVF
SIGKVFRTVLFKSKF

SEQ ID NO: 276818 - protein, 15 aa, Artificial Sequence
  Description of Artificial Sequence: Synthetic peptide
  Seed: SIGKVCRTLLAKSVF
SIFKVGRNLLMKSVF

SEQ ID NO: 276819 - protein, 15 aa, Artificial Sequence
  Description of Artificial Sequence: Synthetic peptide
  Seed: SIGKVCRTLLAKSVF
SIFKVLRNLLCKSVF

SEQ ID NO: 276820 - protein, 15 aa, Artificial Sequence
  Description of Artificial Sequence: Synthetic peptide
  Seed: SIGKVCRTLLAKSVF
SIFKVHRSLLDKSVF

SEQ ID NO: 276821 - protein, 15 aa, Artificial Sequence
  Description of Artificial Sequence: Synthetic peptide
  Seed: SIGKVCRTLLAKSVF
SIGKVLRTRLFKSFF

SEQ ID NO: 276822 - protein, 15 aa, Artificial Sequence
  Description of Artificial Sequence: Synthetic peptide
  Seed: SIGKVCRTLLAKSVF
SIFKVFRALLRKSVF

SEQ ID NO: 276823 - protein, 15 aa, Artificial Sequence
  Description of Artificial Sequence: Synthetic peptide
  Seed: SIGKVCRTLLAKSVF
SIYKVYRNLLNKSVF

SEQ ID NO: 276824 - protein, 15 aa, Artificial Sequence
  Description of Artificial Sequence: Synthetic peptide
  Seed: SIGKVCRTLLAKSVF
SIWKVLRTLLMKSVF

SEQ ID NO: 276825 - protein, 15 aa, Artificial Sequence
  Description of Artificial Sequence: Synthetic peptide
  Seed: SIGKVCRTLLAKSVF
SIFKVWRTLLEKSVF

SEQ ID NO: 276826 - protein, 15 aa, Artificial Sequence
  Description of Artificial Sequence: Synthetic peptide
  Seed: SIGKVCRTLLAKSVF
SIGKFCRILRAKLVF

SEQ ID NO: 276827 - protein, 15 aa, Artificial Sequence
  Description of Artificial Sequence: Synthetic peptide
  Seed: SIGKVCRTLLAKSVF
SIFKVHRALLDKSVF

SEQ ID NO: 276828 - protein, 15 aa, Artificial Sequence
  Description of Artificial Sequence: Synthetic peptide
  Seed: SIGKVCRTLLAKSVF
SIFKVNRTLLDKSVF

SEQ ID NO: 276829 - protein, 15 aa, Artificial Sequence
  Description of Artificial Sequence: Synthetic peptide
  Seed: SIGKVCRTLLAKSVF
SIGKVRRTLLFKSVF

SEQ ID NO: 276830 - protein, 15 aa, Artificial Sequence
  Description of Artificial Sequence: Synthetic peptide
  Seed: SIGKVCRTLLAKSVF
SIIKVSRNLLIKSVF

SEQ ID NO: 276831 - protein, 15 aa, Artificial Sequence
  Description of Artificial Sequence: Synthetic peptide
  Seed: SIGKVCRTLLAKSVF
SIGKVFRTELFKSRF

SEQ ID NO: 276832 - protein, 15 aa, Artificial Sequence
  Description of Artificial Sequence: Synthetic peptide
  Seed: SIGKVCRTLLAKSVF
SIGKVFRTQLFKSRF

SEQ ID NO: 276833 - protein, 15 aa, Artificial Sequence
  Description of Artificial Sequence: Synthetic peptide
  Seed: SIGKVCRTLLAKSVF
SIGKVIRTTLFKSKF

SEQ ID NO: 276834 - protein, 15 aa, Artificial Sequence
  Description of Artificial Sequence: Synthetic peptide
  Seed: SIGKVCRTLLAKSVF
SIGKNCRSLIAKAVF

SEQ ID NO: 276835 - protein, 15 aa, Artificial Sequence
  Description of Artificial Sequence: Synthetic peptide
  Seed: SIGKVCRTLLAKSVF
SIGKVFRTYLFKSKF

SEQ ID NO: 276836 - protein, 15 aa, Artificial Sequence
  Description of Artificial Sequence: Synthetic peptide
  Seed: EECLINDPWVLLNAS
EECWINTPFVLFNAS

SEQ ID NO: 276837 - protein, 15 aa, Artificial Sequence
  Description of Artificial Sequence: Synthetic peptide
  Seed: SIGKVCRTLLAKSVF
SIGKFCRHLFAKLVF

SEQ ID NO: 276838 - protein, 15 aa, Artificial Sequence
  Description of Artificial Sequence: Synthetic peptide
  Seed: SIGKVCRTLLAKSVF
SIGKVFRTALFKSKF

SEQ ID NO: 276839 - protein, 15 aa, Artificial Sequence
  Description of Artificial Sequence: Synthetic peptide
  Seed: DPWVLLNASWFNSFL
DPFVLFNSSWSNSFL

SEQ ID NO: 276840 - protein, 15 aa, Artificial Sequence
  Description of Artificial Sequence: Synthetic peptide
  Seed: SIGKVCRTLLAKSVF
SIGKYCRILRAKIVF

SEQ ID NO: 276841 - protein, 15 aa, Artificial Sequence
  Description of Artificial Sequence: Synthetic peptide
  Seed: SIGKVCRTLLAKSVF
SIGKVLRTSLFKSRF

SEQ ID NO: 276842 - protein, 15 aa, Artificial Sequence
  Description of Artificial Sequence: Synthetic peptide
  Seed: DPWVLLNASWFNSFL
DPFVLYNNSWANSFL

SEQ ID NO: 276843 - protein, 15 aa, Artificial Sequence
  Description of Artificial Sequence: Synthetic peptide
  Seed: SIGKVCRTLLAKSVF
SIQKVMRNLLAKSVF

SEQ ID NO: 276844 - protein, 15 aa, Artificial Sequence
  Description of Artificial Sequence: Synthetic peptide
  Seed: DPWVLLNASWFNSFL
DPWVLFNAEWLNSML

SEQ ID NO: 276845 - protein, 15 aa, Artificial Sequence
  Description of Artificial Sequence: Synthetic peptide
  Seed: SIGKVCRTLLAKSVF
SIGKFCRTLFAKTVF

SEQ ID NO: 276846 - protein, 15 aa, Artificial Sequence
  Description of Artificial Sequence: Synthetic peptide
  Seed: EECLINDPWVLLNAS
EECFINLPFVLENAS

SEQ ID NO: 276847 - protein, 15 aa, Artificial Sequence
  Description of Artificial Sequence: Synthetic peptide
  Seed: SIGKVCRTLLAKSVF
SIGKVFRTTLLKSPF

SEQ ID NO: 276848 - protein, 15 aa, Artificial Sequence
  Description of Artificial Sequence: Synthetic peptide
  Seed: EECLINDPWVLLNAS
EECFINEPFVLNNAS

SEQ ID NO: 276849 - protein, 15 aa, Artificial Sequence
  Description of Artificial Sequence: Synthetic peptide
  Seed: DPWVLLNASWFNSFL
DPFVLFNSSWTNSFL

SEQ ID NO: 276850 - protein, 15 aa, Artificial Sequence
  Description of Artificial Sequence: Synthetic peptide
  Seed: SIGKVCRTLLAKSVF
SIGKVCRTTLFKSFF

SEQ ID NO: 276851 - protein, 15 aa, Artificial Sequence
  Description of Artificial Sequence: Synthetic peptide
  Seed: SIGKVCRTLLAKSVF
SIGKFCRTLFAKNVF

SEQ ID NO: 276852 - protein, 15 aa, Artificial Sequence
  Description of Artificial Sequence: Synthetic peptide
  Seed: SIGKVCRTLLAKSVF
SIGKVRRTFLFKSIF

SEQ ID NO: 276853 - protein, 15 aa, Artificial Sequence
  Description of Artificial Sequence: Synthetic peptide
  Seed: EECLINDPWVLLNAS
EECVINEPFVLLNAS

SEQ ID NO: 276854 - protein, 15 aa, Artificial Sequence
  Description of Artificial Sequence: Synthetic peptide
  Seed: EECLINDPWVLLNAS
EECFINLPFVLTNAS

SEQ ID NO: 276855 - protein, 15 aa, Artificial Sequence
  Description of Artificial Sequence: Synthetic peptide
  Seed: EECLINDPWVLLNAS
EECYINTPFVLYNAS

SEQ ID NO: 276856 - protein, 15 aa, Artificial Sequence
  Description of Artificial Sequence: Synthetic peptide
  Seed: SIGKVCRTLLAKSVF
SIGKVRRTSLFKSLF

SEQ ID NO: 276857 - protein, 15 aa, Artificial Sequence
  Description of Artificial Sequence: Synthetic peptide
  Seed: DPWVLLNASWFNSFL
DPFVLFNTSWHNSFL

SEQ ID NO: 276858 - protein, 15 aa, Artificial Sequence
  Description of Artificial Sequence: Synthetic peptide
  Seed: SIGKVCRTLLAKSVF
SIGKVFRTRLFKSSF

SEQ ID NO: 276859 - protein, 15 aa, Artificial Sequence
  Description of Artificial Sequence: Synthetic peptide
  Seed: EECLINDPWVLLNAS
EECYINVPFVLFNAS

SEQ ID NO: 276860 - protein, 15 aa, Artificial Sequence
  Description of Artificial Sequence: Synthetic peptide
  Seed: SIGKVCRTLLAKSVF
SIGKYCRTLFAKVVF

SEQ ID NO: 276861 - protein, 15 aa, Artificial Sequence
  Description of Artificial Sequence: Synthetic peptide
  Seed: EECLINDPWVLLNAS
EECFINEPWVLLNAS

SEQ ID NO: 276862 - protein, 15 aa, Artificial Sequence
  Description of Artificial Sequence: Synthetic peptide
  Seed: SIGKVCRTLLAKSVF
SIGKFCRALFAKMVF

SEQ ID NO: 276863 - protein, 15 aa, Artificial Sequence
  Description of Artificial Sequence: Synthetic peptide
  Seed: DPWVLLNASWFNSFL
DPFVLFNTSWNNSFL

SEQ ID NO: 276864 - protein, 15 aa, Artificial Sequence
  Description of Artificial Sequence: Synthetic peptide
  Seed: EECLINDPWVLLNAS
EECVINEPFVLINAS

SEQ ID NO: 276865 - protein, 15 aa, Artificial Sequence
  Description of Artificial Sequence: Synthetic peptide
  Seed: SIGKVCRTLLAKSVF
SIGKVFRTELFKSKF

SEQ ID NO: 276866 - protein, 15 aa, Artificial Sequence
  Description of Artificial Sequence: Synthetic peptide
  Seed: SIGKVCRTLLAKSVF
SIGKVFRTFLLKSRF

SEQ ID NO: 276867 - protein, 15 aa, Artificial Sequence
  Description of Artificial Sequence: Synthetic peptide
  Seed: EECLINDPWVLLNAS
EECFINLPFVLNNAS

SEQ ID NO: 276868 - protein, 15 aa, Artificial Sequence
  Description of Artificial Sequence: Synthetic peptide
  Seed: EECLINDPWVLLNAS
EECFINPPFVLLNAS

SEQ ID NO: 276869 - protein, 15 aa, Artificial Sequence
  Description of Artificial Sequence: Synthetic peptide
  Seed: DPWVLLNASWFNSFL
DPFVLFNSSWHNSFL

SEQ ID NO: 276870 - protein, 15 aa, Artificial Sequence
  Description of Artificial Sequence: Synthetic peptide
  Seed: DPWVLLNASWFNSFL
DPFVLYNTSWANSFL

SEQ ID NO: 276871 - protein, 15 aa, Artificial Sequence
  Description of Artificial Sequence: Synthetic peptide
  Seed: SIGKVCRTLLAKSVF
SILKVFRILLHKSVF

SEQ ID NO: 276872 - protein, 15 aa, Artificial Sequence
  Description of Artificial Sequence: Synthetic peptide
  Seed: EECLINDPWVLLNAS
EECVINEPFVLVNAS

SEQ ID NO: 276873 - protein, 15 aa, Artificial Sequence
  Description of Artificial Sequence: Synthetic peptide
  Seed: EECLINDPWVLLNAS
EECFINCPFVLLNAS

SEQ ID NO: 276874 - protein, 15 aa, Artificial Sequence
  Description of Artificial Sequence: Synthetic peptide
  Seed: EECLINDPWVLLNAS
EECFINLPFVLDNAS

SEQ ID NO: 276875 - protein, 15 aa, Artificial Sequence
  Description of Artificial Sequence: Synthetic peptide
  Seed: EECLINDPWVLLNAS
EECFINSPFVLQNAS

SEQ ID NO: 276876 - protein, 15 aa, Artificial Sequence
  Description of Artificial Sequence: Synthetic peptide
  Seed: DPWVLLNASWFNSFL
DPFVLFNNSWSNSFL

SEQ ID NO: 276877 - protein, 15 aa, Artificial Sequence
  Description of Artificial Sequence: Synthetic peptide
  Seed: EECLINDPWVLLNAS
EECYINTPYVLLNAS

SEQ ID NO: 276878 - protein, 15 aa, Artificial Sequence
  Description of Artificial Sequence: Synthetic peptide
  Seed: EECLINDPWVLLNAS
EECFINVPFVLPNAS

SEQ ID NO: 276879 - protein, 15 aa, Artificial Sequence
  Description of Artificial Sequence: Synthetic peptide
  Seed: DPWVLLNASWFNSFL
DPFVLYNASWANSFL

SEQ ID NO: 276880 - protein, 15 aa, Artificial Sequence
  Description of Artificial Sequence: Synthetic peptide
  Seed: EECLINDPWVLLNAS
EECYINEPFVLMNAS

SEQ ID NO: 276881 - protein, 15 aa, Artificial Sequence
  Description of Artificial Sequence: Synthetic peptide
  Seed: EECLINDPWVLLNAS
EECFINLPYVLVNAS

SEQ ID NO: 276882 - protein, 15 aa, Artificial Sequence
  Description of Artificial Sequence: Synthetic peptide
  Seed: SIGKVCRTLLAKSVF
SIGKFCRTLYAKLVF

SEQ ID NO: 276883 - protein, 15 aa, Artificial Sequence
  Description of Artificial Sequence: Synthetic peptide
  Seed: EECLINDPWVLLNAS
EECFINVPFVLHNAS

SEQ ID NO: 276884 - protein, 15 aa, Artificial Sequence
  Description of Artificial Sequence: Synthetic peptide
  Seed: SIGKVCRTLLAKSVF
SIGKVRRTFLFKSVF

SEQ ID NO: 276885 - protein, 15 aa, Artificial Sequence
  Description of Artificial Sequence: Synthetic peptide
  Seed: EECLINDPWVLLNAS
EECLINTPFVLNNAS

SEQ ID NO: 276886 - protein, 15 aa, Artificial Sequence
  Description of Artificial Sequence: Synthetic peptide
  Seed: SIGKVCRTLLAKSVF
SIGKVMRTFLFKSRF

SEQ ID NO: 276887 - protein, 15 aa, Artificial Sequence
  Description of Artificial Sequence: Synthetic peptide
  Seed: SIGKVCRTLLAKSVF
SIGKVLRTELFKSEF

SEQ ID NO: 276888 - protein, 15 aa, Artificial Sequence
  Description of Artificial Sequence: Synthetic peptide
  Seed: EECLINDPWVLLNAS
EECFINPPFVLINAS

SEQ ID NO: 276889 - protein, 15 aa, Artificial Sequence
  Description of Artificial Sequence: Synthetic peptide
  Seed: SIGKVCRTLLAKSVF
SIGKVYRTSLWKSIF

SEQ ID NO: 276890 - protein, 15 aa, Artificial Sequence
  Description of Artificial Sequence: Synthetic peptide
  Seed: EECLINDPWVLLNAS
EECFINTPLVLMNAS

SEQ ID NO: 276891 - protein, 15 aa, Artificial Sequence
  Description of Artificial Sequence: Synthetic peptide
  Seed: SIGKVCRTLLAKSVF
SIGKVFRTHLVKSIF

SEQ ID NO: 276892 - protein, 15 aa, Artificial Sequence
  Description of Artificial Sequence: Synthetic peptide
  Seed: SIGKVCRTLLAKSVF
SIGKFCRTLFAKAVF

SEQ ID NO: 276893 - protein, 15 aa, Artificial Sequence
  Description of Artificial Sequence: Synthetic peptide
  Seed: DPWVLLNASWFNSFL
DPFVLFNSSWMNSFL

SEQ ID NO: 276894 - protein, 15 aa, Artificial Sequence
  Description of Artificial Sequence: Synthetic peptide
  Seed: SIGKVCRTLLAKSVF
SIGKFCRTLFAKEVF

SEQ ID NO: 276895 - protein, 15 aa, Artificial Sequence
  Description of Artificial Sequence: Synthetic peptide
  Seed: EECLINDPWVLLNAS
EECFINSPFVLPNAS

SEQ ID NO: 276896 - protein, 15 aa, Artificial Sequence
  Description of Artificial Sequence: Synthetic peptide
  Seed: SIGKVCRTLLAKSVF
SIGKVFRTFLAKSYF

SEQ ID NO: 276897 - protein, 15 aa, Artificial Sequence
  Description of Artificial Sequence: Synthetic peptide
  Seed: SIGKVCRTLLAKSVF
SIGKVLRTRLFKSMF

SEQ ID NO: 276898 - protein, 15 aa, Artificial Sequence
  Description of Artificial Sequence: Synthetic peptide
  Seed: EECLINDPWVLLNAS
EECFINTPMVLINAS

SEQ ID NO: 276899 - protein, 15 aa, Artificial Sequence
  Description of Artificial Sequence: Synthetic peptide
  Seed: SIGKVCRTLLAKSVF
SIGKVMRTTLFKSRF

SEQ ID NO: 276900 - protein, 15 aa, Artificial Sequence
  Description of Artificial Sequence: Synthetic peptide
  Seed: SIGKVCRTLLAKSVF
SIGKFCRLLRAKSVF

SEQ ID NO: 276901 - protein, 15 aa, Artificial Sequence
  Description of Artificial Sequence: Synthetic peptide
  Seed: SIGKVCRTLLAKSVF
SIGKVMRTRLFKSFF

SEQ ID NO: 276902 - protein, 15 aa, Artificial Sequence
  Description of Artificial Sequence: Synthetic peptide
  Seed: EECLINDPWVLLNAS
EECFINQPFVLTNAS

SEQ ID NO: 276903 - protein, 15 aa, Artificial Sequence
  Description of Artificial Sequence: Synthetic peptide
  Seed: SIGKVCRTLLAKSVF
SIGKVFRTSLLKSAF

SEQ ID NO: 276904 - protein, 15 aa, Artificial Sequence
  Description of Artificial Sequence: Synthetic peptide
  Seed: EECLINDPWVLLNAS
EECFINEPFVLDNAS

SEQ ID NO: 276905 - protein, 15 aa, Artificial Sequence
  Description of Artificial Sequence: Synthetic peptide
  Seed: DPWVLLNASWFNSFL
DPYVLFNSSWVNSFL

SEQ ID NO: 276906 - protein, 15 aa, Artificial Sequence
  Description of Artificial Sequence: Synthetic peptide
  Seed: EECLINDPWVLLNAS
EECIINTPFVLSNAS

SEQ ID NO: 276907 - protein, 15 aa, Artificial Sequence
  Description of Artificial Sequence: Synthetic peptide
  Seed: DPWVLLNASWFNSFL
DPLVLINNSWANSFL

SEQ ID NO: 276908 - protein, 15 aa, Artificial Sequence
  Description of Artificial Sequence: Synthetic peptide
  Seed: DPWVLLNASWFNSFL
DPYVLINISWENSFL

SEQ ID NO: 276909 - protein, 15 aa, Artificial Sequence
  Description of Artificial Sequence: Synthetic peptide
  Seed: EECLINDPWVLLNAS
EECFINQPFVLANAS

SEQ ID NO: 276910 - protein, 15 aa, Artificial Sequence
  Description of Artificial Sequence: Synthetic peptide
  Seed: EECLINDPWVLLNAS
EECIINEPFVLFNAS

SEQ ID NO: 276911 - protein, 15 aa, Artificial Sequence
  Description of Artificial Sequence: Synthetic peptide
  Seed: EECLINDPWVLLNAS
EECYINTPFVLNNAS

SEQ ID NO: 276912 - protein, 15 aa, Artificial Sequence
  Description of Artificial Sequence: Synthetic peptide
  Seed: SIGKVCRTLLAKSVF
SIGKVYRTSLFKSRF

SEQ ID NO: 276913 - protein, 15 aa, Artificial Sequence
  Description of Artificial Sequence: Synthetic peptide
  Seed: SIGKVCRTLLAKSVF
SIGKVFRTKLWKSLF

SEQ ID NO: 276914 - protein, 15 aa, Artificial Sequence
  Description of Artificial Sequence: Synthetic peptide
  Seed: SIGKVCRTLLAKSVF
SIGKVFRTFLMKSNF

SEQ ID NO: 276915 - protein, 15 aa, Artificial Sequence
  Description of Artificial Sequence: Synthetic peptide
  Seed: EECLINDPWVLLNAS
EECFINTPFVLRNAS

SEQ ID NO: 276916 - protein, 15 aa, Artificial Sequence
  Description of Artificial Sequence: Synthetic peptide
  Seed: SIGKVCRTLLAKSVF
SIGKVFRTWLAKSLF

SEQ ID NO: 276917 - protein, 15 aa, Artificial Sequence
  Description of Artificial Sequence: Synthetic peptide
  Seed: SIGKVCRTLLAKSVF
SIGKVMRTRLFKSLF

SEQ ID NO: 276918 - protein, 15 aa, Artificial Sequence
  Description of Artificial Sequence: Synthetic peptide
  Seed: SIGKVCRTLLAKSVF
SIGKVIRTFLAKSFF

SEQ ID NO: 276919 - protein, 15 aa, Artificial Sequence
  Description of Artificial Sequence: Synthetic peptide
  Seed: SIGKVCRTLLAKSVF
SIGKVFRTWLAKSIF

SEQ ID NO: 276920 - protein, 15 aa, Artificial Sequence
  Description of Artificial Sequence: Synthetic peptide
  Seed: SIGKVCRTLLAKSVF
SIGKVFRTFLVKSRF

SEQ ID NO: 276921 - protein, 15 aa, Artificial Sequence
  Description of Artificial Sequence: Synthetic peptide
  Seed: EECLINDPWVLLNAS
EECYINIPFVLTNAS

SEQ ID NO: 276922 - protein, 15 aa, Artificial Sequence
  Description of Artificial Sequence: Synthetic peptide
  Seed: SIGKVCRTLLAKSVF
SIGKVFRTDLFKSNF

SEQ ID NO: 276923 - protein, 15 aa, Artificial Sequence
  Description of Artificial Sequence: Synthetic peptide
  Seed: SIGKVCRTLLAKSVF
SIGKVFRTALLKSTF

SEQ ID NO: 276924 - protein, 15 aa, Artificial Sequence
  Description of Artificial Sequence: Synthetic peptide
  Seed: SIGKVCRTLLAKSVF
SIGKFCRTLFAKYVF

SEQ ID NO: 276925 - protein, 15 aa, Artificial Sequence
  Description of Artificial Sequence: Synthetic peptide
  Seed: SIGKVCRTLLAKSVF
SIGKVFRTLLYKSAF

SEQ ID NO: 276926 - protein, 15 aa, Artificial Sequence
  Description of Artificial Sequence: Synthetic peptide
  Seed: DPWVLLNASWFNSFL
DPYVLFNSSWTNSFL

SEQ ID NO: 276927 - protein, 15 aa, Artificial Sequence
  Description of Artificial Sequence: Synthetic peptide
  Seed: SIGKVCRTLLAKSVF
SIGKVFRTQLLKSTF

SEQ ID NO: 276928 - protein, 15 aa, Artificial Sequence
  Description of Artificial Sequence: Synthetic peptide
  Seed: EECLINDPWVLLNAS
EECFINSPFVLWNAS

SEQ ID NO: 276929 - protein, 15 aa, Artificial Sequence
  Description of Artificial Sequence: Synthetic peptide
  Seed: SIGKVCRTLLAKSVF
SIGKVFRTTLWKSEF

SEQ ID NO: 276930 - protein, 15 aa, Artificial Sequence
  Description of Artificial Sequence: Synthetic peptide
  Seed: EECLINDPWVLLNAS
EECWINTPFVLTNAS

SEQ ID NO: 276931 - protein, 15 aa, Artificial Sequence
  Description of Artificial Sequence: Synthetic peptide
  Seed: SIGKVCRTLLAKSVF
SIGKVFRTALLKSAF

SEQ ID NO: 276932 - protein, 15 aa, Artificial Sequence
  Description of Artificial Sequence: Synthetic peptide
  Seed: SIGKVCRTLLAKSVF
SIGKVYRTMLFKSAF

SEQ ID NO: 276933 - protein, 15 aa, Artificial Sequence
  Description of Artificial Sequence: Synthetic peptide
  Seed: SIGKVCRTLLAKSVF
SIGKVLRTQLLKSFF

SEQ ID NO: 276934 - protein, 15 aa, Artificial Sequence
  Description of Artificial Sequence: Synthetic peptide
  Seed: EECLINDPWVLLNAS
EECYINSPFVLANAS

SEQ ID NO: 276935 - protein, 15 aa, Artificial Sequence
  Description of Artificial Sequence: Synthetic peptide
  Seed: DPWVLLNASWFNSFL
DPYVLFNTSWLNSFL

SEQ ID NO: 276936 - protein, 15 aa, Artificial Sequence
  Description of Artificial Sequence: Synthetic peptide
  Seed: EECLINDPWVLLNAS
EECFINAPLVLLNAS

SEQ ID NO: 276937 - protein, 15 aa, Artificial Sequence
  Description of Artificial Sequence: Synthetic peptide
  Seed: EECLINDPWVLLNAS
EECFINSPWVLFNAS

SEQ ID NO: 276938 - protein, 15 aa, Artificial Sequence
  Description of Artificial Sequence: Synthetic peptide
  Seed: EECLINDPWVLLNAS
EECLINSPFVLANAS

SEQ ID NO: 276939 - protein, 15 aa, Artificial Sequence
  Description of Artificial Sequence: Synthetic peptide
  Seed: EECLINDPWVLLNAS
EECFINSPFVLHNAS

SEQ ID NO: 276940 - protein, 15 aa, Artificial Sequence
  Description of Artificial Sequence: Synthetic peptide
  Seed: SIGKVCRTLLAKSVF
SIGKVFRTMLYKSTF

SEQ ID NO: 276941 - protein, 15 aa, Artificial Sequence
  Description of Artificial Sequence: Synthetic peptide
  Seed: EECLINDPWVLLNAS
EECLINNPFVLLNAS

SEQ ID NO: 276942 - protein, 15 aa, Artificial Sequence
  Description of Artificial Sequence: Synthetic peptide
  Seed: SIGKVCRTLLAKSVF
SIGKVFRTQLIKSIF

SEQ ID NO: 276943 - protein, 15 aa, Artificial Sequence
  Description of Artificial Sequence: Synthetic peptide
  Seed: EECLINDPWVLLNAS
EECFINVPWVLMNAS

SEQ ID NO: 276944 - protein, 15 aa, Artificial Sequence
  Description of Artificial Sequence: Synthetic peptide
  Seed: SIGKVCRTLLAKSVF
SIGKVFRTPLFKSWF

SEQ ID NO: 276945 - protein, 15 aa, Artificial Sequence
  Description of Artificial Sequence: Synthetic peptide
  Seed: SIGKVCRTLLAKSVF
SIGKVFRTELLKSTF

SEQ ID NO: 276946 - protein, 15 aa, Artificial Sequence
  Description of Artificial Sequence: Synthetic peptide
  Seed: EECLINDPWVLLNAS
EECFINGPFVLFNAS

SEQ ID NO: 276947 - protein, 15 aa, Artificial Sequence
  Description of Artificial Sequence: Synthetic peptide
  Seed: EECLINDPWVLLNAS
EECFINSPWVLMNAS

SEQ ID NO: 276948 - protein, 15 aa, Artificial Sequence
  Description of Artificial Sequence: Synthetic peptide
  Seed: DPWVLLNASWFNSFL
DPFVLINSSWKNSFL

SEQ ID NO: 276949 - protein, 15 aa, Artificial Sequence
  Description of Artificial Sequence: Synthetic peptide
  Seed: EECLINDPWVLLNAS
EECFINIPWVLMNAS

SEQ ID NO: 276950 - protein, 15 aa, Artificial Sequence
  Description of Artificial Sequence: Synthetic peptide
  Seed: SIGKVCRTLLAKSVF
SIGKVYRTSLMKSIF

SEQ ID NO: 276951 - protein, 15 aa, Artificial Sequence
  Description of Artificial Sequence: Synthetic peptide
  Seed: SIGKVCRTLLAKSVF
SIGKVYRTSLMKSLF

SEQ ID NO: 276952 - protein, 15 aa, Artificial Sequence
  Description of Artificial Sequence: Synthetic peptide
  Seed: SIGKVCRTLLAKSVF
SIGKVFRTQLIKSVF

SEQ ID NO: 276953 - protein, 15 aa, Artificial Sequence
  Description of Artificial Sequence: Synthetic peptide
  Seed: DPWVLLNASWFNSFL
DPYVLFNSSWINSFL

SEQ ID NO: 276954 - protein, 15 aa, Artificial Sequence
  Description of Artificial Sequence: Synthetic peptide
  Seed: DPWVLLNASWFNSFL
DPFVLYNTSWLNSFL

SEQ ID NO: 276955 - protein, 15 aa, Artificial Sequence
  Description of Artificial Sequence: Synthetic peptide
  Seed: SIGKVCRTLLAKSVF
SIGKVIRTLLYKSIF

SEQ ID NO: 276956 - protein, 15 aa, Artificial Sequence
  Description of Artificial Sequence: Synthetic peptide
  Seed: SIGKVCRTLLAKSVF
SIGKVFRTILWKSSF

SEQ ID NO: 276957 - protein, 15 aa, Artificial Sequence
  Description of Artificial Sequence: Synthetic peptide
  Seed: SIGKVCRTLLAKSVF
SIGKFCRTLFAKDVF

SEQ ID NO: 276958 - protein, 15 aa, Artificial Sequence
  Description of Artificial Sequence: Synthetic peptide
  Seed: DPWVLLNASWFNSFL
DPWVLFNALWLNSIL

SEQ ID NO: 276959 - protein, 15 aa, Artificial Sequence
  Description of Artificial Sequence: Synthetic peptide
  Seed: EECLINDPWVLLNAS
EECYINNPFVLINAS

SEQ ID NO: 276960 - protein, 15 aa, Artificial Sequence
  Description of Artificial Sequence: Synthetic peptide
  Seed: EECLINDPWVLLNAS
EECFINSPFVLCNAS

SEQ ID NO: 276961 - protein, 15 aa, Artificial Sequence
  Description of Artificial Sequence: Synthetic peptide
  Seed: DPWVLLNASWFNSFL
DPWILLNANWFHSFL

SEQ ID NO: 276962 - protein, 15 aa, Artificial Sequence
  Description of Artificial Sequence: Synthetic peptide
  Seed: DPWVLLNASWFNSFL
DPIVLMNNSWMNSFL

SEQ ID NO: 276963 - protein, 15 aa, Artificial Sequence
  Description of Artificial Sequence: Synthetic peptide
  Seed: SIGKVCRTLLAKSVF
SIGKFCRHLFAKFVF

SEQ ID NO: 276964 - protein, 15 aa, Artificial Sequence
  Description of Artificial Sequence: Synthetic peptide
  Seed: SIGKVCRTLLAKSVF
SIGKVYRTALWKSVF

SEQ ID NO: 276965 - protein, 15 aa, Artificial Sequence
  Description of Artificial Sequence: Synthetic peptide
  Seed: EECLINDPWVLLNAS
EECWINTPFVLANAS

SEQ ID NO: 276966 - protein, 15 aa, Artificial Sequence
  Description of Artificial Sequence: Synthetic peptide
  Seed: EECLINDPWVLLNAS
EECWINQPFVLVNAS

SEQ ID NO: 276967 - protein, 15 aa, Artificial Sequence
  Description of Artificial Sequence: Synthetic peptide
  Seed: EECLINDPWVLLNAS
EECLINEPFVLTNAS

SEQ ID NO: 276968 - protein, 15 aa, Artificial Sequence
  Description of Artificial Sequence: Synthetic peptide
  Seed: SIGKVCRTLLAKSVF
SIGKVLRTTLYKSTF

SEQ ID NO: 276969 - protein, 15 aa, Artificial Sequence
  Description of Artificial Sequence: Synthetic peptide
  Seed: SIGKVCRTLLAKSVF
SIGKVFRTALWKSAF

SEQ ID NO: 276970 - protein, 15 aa, Artificial Sequence
  Description of Artificial Sequence: Synthetic peptide
  Seed: SIGKVCRTLLAKSVF
SIGKVYRTMLYKSIF

SEQ ID NO: 276971 - protein, 15 aa, Artificial Sequence
  Description of Artificial Sequence: Synthetic peptide
  Seed: DPWVLLNASWFNSFL
DPFVLFNTSWINSFL

SEQ ID NO: 276972 - protein, 15 aa, Artificial Sequence
  Description of Artificial Sequence: Synthetic peptide
  Seed: SIGKVCRTLLAKSVF
SIGKVFRTFLVKSMF

SEQ ID NO: 276973 - protein, 15 aa, Artificial Sequence
  Description of Artificial Sequence: Synthetic peptide
  Seed: EECLINDPWVLLNAS
EECYINQPFVLFNAS

SEQ ID NO: 276974 - protein, 15 aa, Artificial Sequence
  Description of Artificial Sequence: Synthetic peptide
  Seed: SIGKVCRTLLAKSVF
SIGKVFRTYLAKSFF

SEQ ID NO: 276975 - protein, 15 aa, Artificial Sequence
  Description of Artificial Sequence: Synthetic peptide
  Seed: EECLINDPWVLLNAS
EECFINLPWVLVNAS

SEQ ID NO: 276976 - protein, 15 aa, Artificial Sequence
  Description of Artificial Sequence: Synthetic peptide
  Seed: SIGKVCRTLLAKSVF
SIGKVIRTFLIKSVF

SEQ ID NO: 276977 - protein, 15 aa, Artificial Sequence
  Description of Artificial Sequence: Synthetic peptide
  Seed: SIGKVCRTLLAKSVF
SIGKVVRTSLWKSIF

SEQ ID NO: 276978 - protein, 15 aa, Artificial Sequence
  Description of Artificial Sequence: Synthetic peptide
  Seed: EECLINDPWVLLNAS
EECFINMPFVLANAS

SEQ ID NO: 276979 - protein, 15 aa, Artificial Sequence
  Description of Artificial Sequence: Synthetic peptide
  Seed: SIGKVCRTLLAKSVF
SIGKVFRTMLYKSNF

SEQ ID NO: 276980 - protein, 15 aa, Artificial Sequence
  Description of Artificial Sequence: Synthetic peptide
  Seed: SIGKVCRTLLAKSVF
SIGKVFRTWLAKSFF

SEQ ID NO: 276981 - protein, 15 aa, Artificial Sequence
  Description of Artificial Sequence: Synthetic peptide
  Seed: DPWVLLNASWFNSFL
DPIVLLNTSWHNSFL

SEQ ID NO: 276982 - protein, 15 aa, Artificial Sequence
  Description of Artificial Sequence: Synthetic peptide
  Seed: EECLINDPWVLLNAS
EECFINLPWVLLNAS

SEQ ID NO: 276983 - protein, 15 aa, Artificial Sequence
  Description of Artificial Sequence: Synthetic peptide
  Seed: SIGKVCRTLLAKSVF
SIGKVFRTLLYKSSF

SEQ ID NO: 276984 - protein, 15 aa, Artificial Sequence
  Description of Artificial Sequence: Synthetic peptide
  Seed: SIGKVCRTLLAKSVF
SIGKVYRTELFKSEF

SEQ ID NO: 276985 - protein, 15 aa, Artificial Sequence
  Description of Artificial Sequence: Synthetic peptide
  Seed: SIGKVCRTLLAKSVF
SIGKVFRTMLMKSYF

SEQ ID NO: 276986 - protein, 15 aa, Artificial Sequence
  Description of Artificial Sequence: Synthetic peptide
  Seed: EECLINDPWVLLNAS
EECLINHPFVLFNAS

SEQ ID NO: 276987 - protein, 15 aa, Artificial Sequence
  Description of Artificial Sequence: Synthetic peptide
  Seed: SIGKVCRTLLAKSVF
SIGKVFRTHLVKSFF

SEQ ID NO: 276988 - protein, 15 aa, Artificial Sequence
  Description of Artificial Sequence: Synthetic peptide
  Seed: SIGKVCRTLLAKSVF
SIGKVLRTFLAKSFF

SEQ ID NO: 276989 - protein, 15 aa, Artificial Sequence
  Description of Artificial Sequence: Synthetic peptide
  Seed: SIGKVCRTLLAKSVF
SIGKVYRTTLMKSVF

SEQ ID NO: 276990 - protein, 15 aa, Artificial Sequence
  Description of Artificial Sequence: Synthetic peptide
  Seed: SIGKVCRTLLAKSVF
SIGKFCRHLFAKMVF

SEQ ID NO: 276991 - protein, 15 aa, Artificial Sequence
  Description of Artificial Sequence: Synthetic peptide
  Seed: SIGKVCRTLLAKSVF
SIGKVFRTGLLKSVF

SEQ ID NO: 276992 - protein, 15 aa, Artificial Sequence
  Description of Artificial Sequence: Synthetic peptide
  Seed: EECLINDPWVLLNAS
EECIINTPYVLINAS

SEQ ID NO: 276993 - protein, 15 aa, Artificial Sequence
  Description of Artificial Sequence: Synthetic peptide
  Seed: SIGKVCRTLLAKSVF
SIGKVLRTLLLKSYF

SEQ ID NO: 276994 - protein, 15 aa, Artificial Sequence
  Description of Artificial Sequence: Synthetic peptide
  Seed: SIGKVCRTLLAKSVF
SIGKVYRTFLAKSFF

SEQ ID NO: 276995 - protein, 15 aa, Artificial Sequence
  Description of Artificial Sequence: Synthetic peptide
  Seed: EECLINDPWVLLNAS
EECFINEPFVLPNAS

SEQ ID NO: 276996 - protein, 15 aa, Artificial Sequence
  Description of Artificial Sequence: Synthetic peptide
  Seed: DPWVLLNASWFNSFL
DPFVLMNNSWFNSFL

SEQ ID NO: 276997 - protein, 15 aa, Artificial Sequence
  Description of Artificial Sequence: Synthetic peptide
  Seed: SIGKVCRTLLAKSVF
SIGKVFRTNLIKSLF

SEQ ID NO: 276998 - protein, 15 aa, Artificial Sequence
  Description of Artificial Sequence: Synthetic peptide
  Seed: DPWVLLNASWFNSFL
DPYVLFNSSWKNSFL

SEQ ID NO: 276999 - protein, 15 aa, Artificial Sequence
  Description of Artificial Sequence: Synthetic peptide
  Seed: EECLINDPWVLLNAS
EECFINWPFVLMNAS

SEQ ID NO: 277000 - protein, 15 aa, Artificial Sequence
  Description of Artificial Sequence: Synthetic peptide
  Seed: SIGKVCRTLLAKSVF
SIGKVWRTFLAKSVF

SEQ ID NO: 277001 - protein, 15 aa, Artificial Sequence
  Description of Artificial Sequence: Synthetic peptide
  Seed: SIGKVCRTLLAKSVF
SIGKVMRTSLLKSFF

SEQ ID NO: 277002 - protein, 15 aa, Artificial Sequence
  Description of Artificial Sequence: Synthetic peptide
  Seed: SIGKVCRTLLAKSVF
SIGKVIRTFLAKSYF

SEQ ID NO: 277003 - protein, 15 aa, Artificial Sequence
  Description of Artificial Sequence: Synthetic peptide
  Seed: SIGKVCRTLLAKSVF
SIGKVIRTFLIKSLF

SEQ ID NO: 277004 - protein, 15 aa, Artificial Sequence
  Description of Artificial Sequence: Synthetic peptide
  Seed: SIGKVCRTLLAKSVF
SIGKVFRTNLIKSIF

SEQ ID NO: 277005 - protein, 15 aa, Artificial Sequence
  Description of Artificial Sequence: Synthetic peptide
  Seed: SIGKVCRTLLAKSVF
SIGKVFRTYLVKSVF

SEQ ID NO: 277006 - protein, 15 aa, Artificial Sequence
  Description of Artificial Sequence: Synthetic peptide
  Seed: SIGKVCRTLLAKSVF
SIGKVFRTFLAKSKF

SEQ ID NO: 277007 - protein, 15 aa, Artificial Sequence
  Description of Artificial Sequence: Synthetic peptide
  Seed: SIGKVCRTLLAKSVF
SIGKVFRTFLSKSYF

SEQ ID NO: 277008 - protein, 15 aa, Artificial Sequence
  Description of Artificial Sequence: Synthetic peptide
  Seed: SIGKVCRTLLAKSVF
SIGKVFRTQLLKSSF

SEQ ID NO: 277009 - protein, 15 aa, Artificial Sequence
  Description of Artificial Sequence: Synthetic peptide
  Seed: SIGKVCRTLLAKSVF
SIGKVFRTYLVKSLF

SEQ ID NO: 277010 - protein, 15 aa, Artificial Sequence
  Description of Artificial Sequence: Synthetic peptide
  Seed: DPWVLLNASWFNSFL
DPYVLFNNSWSNSFL

SEQ ID NO: 277011 - protein, 15 aa, Artificial Sequence
  Description of Artificial Sequence: Synthetic peptide
  Seed: SIGKVCRTLLAKSVF
SIGKVMRTELFKSEF

SEQ ID NO: 277012 - protein, 15 aa, Artificial Sequence
  Description of Artificial Sequence: Synthetic peptide
  Seed: EECLINDPWVLLNAS
EECVINAPFVLVNAS

SEQ ID NO: 277013 - protein, 15 aa, Artificial Sequence
  Description of Artificial Sequence: Synthetic peptide
  Seed: EECLINDPWVLLNAS
EECFINLPYVLMNAS

SEQ ID NO: 277014 - protein, 15 aa, Artificial Sequence
  Description of Artificial Sequence: Synthetic peptide
  Seed: SIGKVCRTLLAKSVF
SIGKVWRTFLAKSLF

SEQ ID NO: 277015 - protein, 15 aa, Artificial Sequence
  Description of Artificial Sequence: Synthetic peptide
  Seed: SIGKVCRTLLAKSVF
SIGKVMRTFLIKSIF

SEQ ID NO: 277016 - protein, 15 aa, Artificial Sequence
  Description of Artificial Sequence: Synthetic peptide
  Seed: DPWVLLNASWFNSFL
DPIVLINNSWSNSFL

SEQ ID NO: 277017 - protein, 15 aa, Artificial Sequence
  Description of Artificial Sequence: Synthetic peptide
  Seed: SIGKVCRTLLAKSVF
SIGKVIRTLLWKSVF

SEQ ID NO: 277018 - protein, 15 aa, Artificial Sequence
  Description of Artificial Sequence: Synthetic peptide
  Seed: EECLINDPWVLLNAS
EECFINHPLVLFNAS

SEQ ID NO: 277019 - protein, 15 aa, Artificial Sequence
  Description of Artificial Sequence: Synthetic peptide
  Seed: SIGKVCRTLLAKSVF
SIGKVMRTFLIKSYF

SEQ ID NO: 277020 - protein, 15 aa, Artificial Sequence
  Description of Artificial Sequence: Synthetic peptide
  Seed: SIGKVCRTLLAKSVF
SIGKVFRTFLVKSAF

SEQ ID NO: 277021 - protein, 15 aa, Artificial Sequence
  Description of Artificial Sequence: Synthetic peptide
  Seed: EECLINDPWVLLNAS
EECYINIPYVLVNAS

SEQ ID NO: 277022 - protein, 15 aa, Artificial Sequence
  Description of Artificial Sequence: Synthetic peptide
  Seed: SIGKVCRTLLAKSVF
SIGKVLRTQLLKSYF

SEQ ID NO: 277023 - protein, 15 aa, Artificial Sequence
  Description of Artificial Sequence: Synthetic peptide
  Seed: SIGKVCRTLLAKSVF
SIGKVLRTLLLKSFF

SEQ ID NO: 277024 - protein, 15 aa, Artificial Sequence
  Description of Artificial Sequence: Synthetic peptide
  Seed: SIGKVCRTLLAKSVF
SIGKVIRTFLAKSRF

SEQ ID NO: 277025 - protein, 15 aa, Artificial Sequence
  Description of Artificial Sequence: Synthetic peptide
  Seed: EECLINDPWVLLNAS
EECIINTPWVLVNAS

SEQ ID NO: 277026 - protein, 15 aa, Artificial Sequence
  Description of Artificial Sequence: Synthetic peptide
  Seed: SIGKVCRTLLAKSVF
SIGKVYRTALLKSMF

SEQ ID NO: 277027 - protein, 15 aa, Artificial Sequence
  Description of Artificial Sequence: Synthetic peptide
  Seed: EECLINDPWVLLNAS
EECFINMPWVLINAS

SEQ ID NO: 277028 - protein, 15 aa, Artificial Sequence
  Description of Artificial Sequence: Synthetic peptide
  Seed: SIGKVCRTLLAKSVF
SIGKVFRTSLIKSYF

SEQ ID NO: 277029 - protein, 15 aa, Artificial Sequence
  Description of Artificial Sequence: Synthetic peptide
  Seed: SIGKVCRTLLAKSVF
SIGKVFRTMLWKSTF

SEQ ID NO: 277030 - protein, 15 aa, Artificial Sequence
  Description of Artificial Sequence: Synthetic peptide
  Seed: EECLINDPWVLLNAS
EECFINEPFVLWNAS

SEQ ID NO: 277031 - protein, 15 aa, Artificial Sequence
  Description of Artificial Sequence: Synthetic peptide
  Seed: DPWVLLNASWFNSFL
DPWVLFNATWFNSDL

SEQ ID NO: 277032 - protein, 15 aa, Artificial Sequence
  Description of Artificial Sequence: Synthetic peptide
  Seed: DPWVLLNASWFNSFL
DPFVLFNASWRNSFL

SEQ ID NO: 277033 - protein, 15 aa, Artificial Sequence
  Description of Artificial Sequence: Synthetic peptide
  Seed: SIGKVCRTLLAKSVF
SIGKVIRTLLYKSFF

SEQ ID NO: 277034 - protein, 15 aa, Artificial Sequence
  Description of Artificial Sequence: Synthetic peptide
  Seed: EECLINDPWVLLNAS
EECFINEPIVLINAS

SEQ ID NO: 277035 - protein, 15 aa, Artificial Sequence
  Description of Artificial Sequence: Synthetic peptide
  Seed: EECLINDPWVLLNAS
EECYINDPFVLVNAS

SEQ ID NO: 277036 - protein, 15 aa, Artificial Sequence
  Description of Artificial Sequence: Synthetic peptide
  Seed: DPWVLLNASWFNSFL
DPFVLFNSSWRNSFL

SEQ ID NO: 277037 - protein, 15 aa, Artificial Sequence
  Description of Artificial Sequence: Synthetic peptide
  Seed: SIGKVCRTLLAKSVF
SIGKVYRTLLWKSVF

SEQ ID NO: 277038 - protein, 15 aa, Artificial Sequence
  Description of Artificial Sequence: Synthetic peptide
  Seed: SIGKVCRTLLAKSVF
SIGKVLRTNLLKSFF

SEQ ID NO: 277039 - protein, 15 aa, Artificial Sequence
  Description of Artificial Sequence: Synthetic peptide
  Seed: SIGKVCRTLLAKSVF
SIGKVYRTLLWKSLF

SEQ ID NO: 277040 - protein, 15 aa, Artificial Sequence
  Description of Artificial Sequence: Synthetic peptide
  Seed: SIGKVCRTLLAKSVF
SIGKVIRTLLMKSFF

SEQ ID NO: 277041 - protein, 15 aa, Artificial Sequence
  Description of Artificial Sequence: Synthetic peptide
  Seed: SIGKVCRTLLAKSVF
SIGKVFRTTLIKSAF

SEQ ID NO: 277042 - protein, 15 aa, Artificial Sequence
  Description of Artificial Sequence: Synthetic peptide
  Seed: SIGKVCRTLLAKSVF
SIGKVFRTLLWKSAF

SEQ ID NO: 277043 - protein, 15 aa, Artificial Sequence
  Description of Artificial Sequence: Synthetic peptide
  Seed: SIGKVCRTLLAKSVF
SIGKVFRTFLHKSVF

SEQ ID NO: 277044 - protein, 15 aa, Artificial Sequence
  Description of Artificial Sequence: Synthetic peptide
  Seed: SIGKVCRTLLAKSVF
SIGKVFRTLLVKSYF

SEQ ID NO: 277045 - protein, 15 aa, Artificial Sequence
  Description of Artificial Sequence: Synthetic peptide
  Seed: SIGKVCRTLLAKSVF
SIGKVMRTFLIKSAF

SEQ ID NO: 277046 - protein, 15 aa, Artificial Sequence
  Description of Artificial Sequence: Synthetic peptide
  Seed: SIGKVCRTLLAKSVF
SIGKVFRTFLTKSFF

SEQ ID NO: 277047 - protein, 15 aa, Artificial Sequence
  Description of Artificial Sequence: Synthetic peptide
  Seed: SIGKVCRTLLAKSVF
SIGKVMRTLLMKSVF

SEQ ID NO: 277048 - protein, 15 aa, Artificial Sequence
  Description of Artificial Sequence: Synthetic peptide
  Seed: DPWVLLNASWFNSFL
DPFVLFNTSWRNSFL

SEQ ID NO: 277049 - protein, 15 aa, Artificial Sequence
  Description of Artificial Sequence: Synthetic peptide
  Seed: SIGKVCRTLLAKSVF
SIGKVFRTRLAKSIF

SEQ ID NO: 277050 - protein, 15 aa, Artificial Sequence
  Description of Artificial Sequence: Synthetic peptide
  Seed: DPWVLLNASWFNSFL
DPYVLSNISWINSFL

SEQ ID NO: 277051 - protein, 15 aa, Artificial Sequence
  Description of Artificial Sequence: Synthetic peptide
  Seed: SIGKVCRTLLAKSVF
SIGKVMRTLLMKSFF

SEQ ID NO: 277052 - protein, 15 aa, Artificial Sequence
  Description of Artificial Sequence: Synthetic peptide
  Seed: DPWVLLNASWFNSFL
DPWVLFNAEWFNSDL

SEQ ID NO: 277053 - protein, 15 aa, Artificial Sequence
  Description of Artificial Sequence: Synthetic peptide
  Seed: SIGKVCRTLLAKSVF
SIGKVFRTMLWKSSF

SEQ ID NO: 277054 - protein, 15 aa, Artificial Sequence
  Description of Artificial Sequence: Synthetic peptide
  Seed: SIGKVCRTLLAKSVF
SIGKVFRTYLAKSYF

SEQ ID NO: 277055 - protein, 15 aa, Artificial Sequence
  Description of Artificial Sequence: Synthetic peptide
  Seed: SIGKVCRTLLAKSVF
SIGKVMRTLLMKSIF

SEQ ID NO: 277056 - protein, 15 aa, Artificial Sequence
  Description of Artificial Sequence: Synthetic peptide
  Seed: DPWVLLNASWFNSFL
DPFVLHNNSWLNSFL

SEQ ID NO: 277057 - protein, 15 aa, Artificial Sequence
  Description of Artificial Sequence: Synthetic peptide
  Seed: DPWVLLNASWFNSFL
DPIVLINNSWTNSFL

SEQ ID NO: 277058 - protein, 15 aa, Artificial Sequence
  Description of Artificial Sequence: Synthetic peptide
  Seed: SIGKVCRTLLAKSVF
SIGKVMRTFLIKSMF

SEQ ID NO: 277059 - protein, 15 aa, Artificial Sequence
  Description of Artificial Sequence: Synthetic peptide
  Seed: EECLINDPWVLLNAS
EECLINKPFVLLNAS

SEQ ID NO: 277060 - protein, 15 aa, Artificial Sequence
  Description of Artificial Sequence: Synthetic peptide
  Seed: DPWVLLNASWFNSFL
DPLVLFNASWVNSFL

SEQ ID NO: 277061 - protein, 15 aa, Artificial Sequence
  Description of Artificial Sequence: Synthetic peptide
  Seed: SIGKVCRTLLAKSVF
SIGKVLRTLLMKSYF

SEQ ID NO: 277062 - protein, 15 aa, Artificial Sequence
  Description of Artificial Sequence: Synthetic peptide
  Seed: SIGKVCRTLLAKSVF
SIGKVIRTFLAKSKF

SEQ ID NO: 277063 - protein, 15 aa, Artificial Sequence
  Description of Artificial Sequence: Synthetic peptide
  Seed: SIGKVCRTLLAKSVF
SIGKVIRTILAKSFF

SEQ ID NO: 277064 - protein, 15 aa, Artificial Sequence
  Description of Artificial Sequence: Synthetic peptide
  Seed: SIGKVCRTLLAKSVF
SIGKVFRTHLVKSMF

SEQ ID NO: 277065 - protein, 15 aa, Artificial Sequence
  Description of Artificial Sequence: Synthetic peptide
  Seed: SIGKVCRTLLAKSVF
SIGKVLRTYLIKSVF

SEQ ID NO: 277066 - protein, 15 aa, Artificial Sequence
  Description of Artificial Sequence: Synthetic peptide
  Seed: SIGKVCRTLLAKSVF
SIGKVFRTSLSKSPF

SEQ ID NO: 277067 - protein, 15 aa, Artificial Sequence
  Description of Artificial Sequence: Synthetic peptide
  Seed: SIGKVCRTLLAKSVF
SIGKVIRTLLMKSVF

SEQ ID NO: 277068 - protein, 15 aa, Artificial Sequence
  Description of Artificial Sequence: Synthetic peptide
  Seed: EECLINDPWVLLNAS
EECFINTPVVLLNAS

SEQ ID NO: 277069 - protein, 15 aa, Artificial Sequence
  Description of Artificial Sequence: Synthetic peptide
  Seed: SIGKVCRTLLAKSVF
SIGKVFRTLLIKSEF

SEQ ID NO: 277070 - protein, 15 aa, Artificial Sequence
  Description of Artificial Sequence: Synthetic peptide
  Seed: EECLINDPWVLLNAS
EECIINSPWVLLNAS

SEQ ID NO: 277071 - protein, 15 aa, Artificial Sequence
  Description of Artificial Sequence: Synthetic peptide
  Seed: EECLINDPWVLLNAS
EECIINIPYVLFNAS

SEQ ID NO: 277072 - protein, 15 aa, Artificial Sequence
  Description of Artificial Sequence: Synthetic peptide
  Seed: SIGKVCRTLLAKSVF
SIGKVMRTLLMKSYF

SEQ ID NO: 277073 - protein, 15 aa, Artificial Sequence
  Description of Artificial Sequence: Synthetic peptide
  Seed: SIGKVCRTLLAKSVF
SIGKVFRTFLAKSWF

SEQ ID NO: 277074 - protein, 15 aa, Artificial Sequence
  Description of Artificial Sequence: Synthetic peptide
  Seed: EECLINDPWVLLNAS
EECFINHPIVLLNAS

SEQ ID NO: 277075 - protein, 15 aa, Artificial Sequence
  Description of Artificial Sequence: Synthetic peptide
  Seed: SIGKVCRTLLAKSVF
SIGKVIRTYLLKSAF

SEQ ID NO: 277076 - protein, 15 aa, Artificial Sequence
  Description of Artificial Sequence: Synthetic peptide
  Seed: SIGKVCRTLLAKSVF
SIGKVIRTMLLKSYF

SEQ ID NO: 277077 - protein, 15 aa, Artificial Sequence
  Description of Artificial Sequence: Synthetic peptide
  Seed: EECLINDPWVLLNAS
EECFINSPIVLFNAS

SEQ ID NO: 277078 - protein, 15 aa, Artificial Sequence
  Description of Artificial Sequence: Synthetic peptide
  Seed: SIGKVCRTLLAKSVF
SIGKVIRTYLLKSFF

SEQ ID NO: 277079 - protein, 15 aa, Artificial Sequence
  Description of Artificial Sequence: Synthetic peptide
  Seed: SIGKVCRTLLAKSVF
SIGKVFRTGLIKSVF

SEQ ID NO: 277080 - protein, 15 aa, Artificial Sequence
  Description of Artificial Sequence: Synthetic peptide
  Seed: SIGKVCRTLLAKSVF
SIGKVFRTELLKSWF

SEQ ID NO: 277081 - protein, 15 aa, Artificial Sequence
  Description of Artificial Sequence: Synthetic peptide
  Seed: EECLINDPWVLLNAS
EECFINHPYVLFNAS

SEQ ID NO: 277082 - protein, 15 aa, Artificial Sequence
  Description of Artificial Sequence: Synthetic peptide
  Seed: DPWVLLNASWFNSFL
DPFVLSNNSWMNSFL

SEQ ID NO: 277083 - protein, 15 aa, Artificial Sequence
  Description of Artificial Sequence: Synthetic peptide
  Seed: SIGKVCRTLLAKSVF
SIGKVIRTILIKSVF

SEQ ID NO: 277084 - protein, 15 aa, Artificial Sequence
  Description of Artificial Sequence: Synthetic peptide
  Seed: EECLINDPWVLLNAS
EECFINNPYVLLNAS

SEQ ID NO: 277085 - protein, 15 aa, Artificial Sequence
  Description of Artificial Sequence: Synthetic peptide
  Seed: SIGKVCRTLLAKSVF
SIGKVLRTFLAKSRF

SEQ ID NO: 277086 - protein, 15 aa, Artificial Sequence
  Description of Artificial Sequence: Synthetic peptide
  Seed: SIGKVCRTLLAKSVF
SIGKVIRTLLIKSIF

SEQ ID NO: 277087 - protein, 15 aa, Artificial Sequence
  Description of Artificial Sequence: Synthetic peptide
  Seed: SIGKVCRTLLAKSVF
SIGKVFRTELWKSSF

SEQ ID NO: 277088 - protein, 15 aa, Artificial Sequence
  Description of Artificial Sequence: Synthetic peptide
  Seed: SIGKVCRTLLAKSVF
SIGKVFRTQLWKSYF

SEQ ID NO: 277089 - protein, 15 aa, Artificial Sequence
  Description of Artificial Sequence: Synthetic peptide
  Seed: DPWVLLNASWFNSFL
DPWVLFNAAWFNSFL

SEQ ID NO: 277090 - protein, 15 aa, Artificial Sequence
  Description of Artificial Sequence: Synthetic peptide
  Seed: SIGKVCRTLLAKSVF
SIGKVYRTFLSKSFF

SEQ ID NO: 277091 - protein, 15 aa, Artificial Sequence
  Description of Artificial Sequence: Synthetic peptide
  Seed: SIGKVCRTLLAKSVF
SIGKVARTALAKSVF

SEQ ID NO: 277092 - protein, 15 aa, Artificial Sequence
  Description of Artificial Sequence: Synthetic peptide
  Seed: SIGKVCRTLLAKSVF
SIGKVIRTILIKSIF

SEQ ID NO: 277093 - protein, 15 aa, Artificial Sequence
  Description of Artificial Sequence: Synthetic peptide
  Seed: SIGKVCRTLLAKSVF
SIGKVYRTMLMKSFF

SEQ ID NO: 277094 - protein, 15 aa, Artificial Sequence
  Description of Artificial Sequence: Synthetic peptide
  Seed: SIGKVCRTLLAKSVF
SIGKVFRTWLAKSAF

SEQ ID NO: 277095 - protein, 15 aa, Artificial Sequence
  Description of Artificial Sequence: Synthetic peptide
  Seed: SIGKVCRTLLAKSVF
SIGKVWRTLLMKSVF

SEQ ID NO: 277096 - protein, 15 aa, Artificial Sequence
  Description of Artificial Sequence: Synthetic peptide
  Seed: DPWVLLNASWFNSFL
DPWVLYNATWFNSFL

SEQ ID NO: 277097 - protein, 15 aa, Artificial Sequence
  Description of Artificial Sequence: Synthetic peptide
  Seed: SIGKVCRTLLAKSVF
SIGKVIRTLLIKSLF

SEQ ID NO: 277098 - protein, 15 aa, Artificial Sequence
  Description of Artificial Sequence: Synthetic peptide
  Seed: EECLINDPWVLLNAS
EECFINNPYVLINAS

SEQ ID NO: 277099 - protein, 15 aa, Artificial Sequence
  Description of Artificial Sequence: Synthetic peptide
  Seed: SIGKVCRTLLAKSVF
SIGKVWRTFLSKSVF

SEQ ID NO: 277100 - protein, 15 aa, Artificial Sequence
  Description of Artificial Sequence: Synthetic peptide
  Seed: DPWVLLNASWFNSFL
DPWVLFNASWFNSDL

SEQ ID NO: 277101 - protein, 15 aa, Artificial Sequence
  Description of Artificial Sequence: Synthetic peptide
  Seed: SIGKVCRTLLAKSVF
SIGKVFRTLLLKSQF

SEQ ID NO: 277102 - protein, 15 aa, Artificial Sequence
  Description of Artificial Sequence: Synthetic peptide
  Seed: SIGKVCRTLLAKSVF
SIGKVIRTLLRKSVF

SEQ ID NO: 277103 - protein, 15 aa, Artificial Sequence
  Description of Artificial Sequence: Synthetic peptide
  Seed: SIGKVCRTLLAKSVF
SIGKVLRTLLIKSFF

SEQ ID NO: 277104 - protein, 15 aa, Artificial Sequence
  Description of Artificial Sequence: Synthetic peptide
  Seed: EECLINDPWVLLNAS
EECIINFPAVLFNAS

SEQ ID NO: 277105 - protein, 15 aa, Artificial Sequence
  Description of Artificial Sequence: Synthetic peptide
  Seed: SIGKVCRTLLAKSVF
SIGKVIRTLLMKSYF

SEQ ID NO: 277106 - protein, 15 aa, Artificial Sequence
  Description of Artificial Sequence: Synthetic peptide
  Seed: SIGKVCRTLLAKSVF
SIGKVLRTLLMKSMF

SEQ ID NO: 277107 - protein, 15 aa, Artificial Sequence
  Description of Artificial Sequence: Synthetic peptide
  Seed: SIGKVCRTLLAKSVF
SIGKVFRTFLTKSRF

SEQ ID NO: 277108 - protein, 15 aa, Artificial Sequence
  Description of Artificial Sequence: Synthetic peptide
  Seed: SIGKVCRTLLAKSVF
SIGKVFRTWLIKSAF

SEQ ID NO: 277109 - protein, 15 aa, Artificial Sequence
  Description of Artificial Sequence: Synthetic peptide
  Seed: DPWVLLNASWFNSFL
DPWVLLNAHWFNSFL

SEQ ID NO: 277110 - protein, 15 aa, Artificial Sequence
  Description of Artificial Sequence: Synthetic peptide
  Seed: SIGKVCRTLLAKSVF
SIGKVFRTFLSKSHF

SEQ ID NO: 277111 - protein, 15 aa, Artificial Sequence
  Description of Artificial Sequence: Synthetic peptide
  Seed: SIGKVCRTLLAKSVF
SIGKVLRTMLYKSYF

SEQ ID NO: 277112 - protein, 15 aa, Artificial Sequence
  Description of Artificial Sequence: Synthetic peptide
  Seed: SIGKVCRTLLAKSVF
SIGKVIRTLLIKSFF

SEQ ID NO: 277113 - protein, 15 aa, Artificial Sequence
  Description of Artificial Sequence: Synthetic peptide
  Seed: SIGKVCRTLLAKSVF
SIGKVVRTFLVKSLF

SEQ ID NO: 277114 - protein, 15 aa, Artificial Sequence
  Description of Artificial Sequence: Synthetic peptide
  Seed: SIGKVCRTLLAKSVF
SIGKVYRTLLIKSFF

SEQ ID NO: 277115 - protein, 15 aa, Artificial Sequence
  Description of Artificial Sequence: Synthetic peptide
  Seed: SIGKVCRTLLAKSVF
SIGKVWRTFLAKSAF

SEQ ID NO: 277116 - protein, 15 aa, Artificial Sequence
  Description of Artificial Sequence: Synthetic peptide
  Seed: DPWVLLNASWFNSFL
DPFVLNNNSWINSFL

SEQ ID NO: 277117 - protein, 15 aa, Artificial Sequence
  Description of Artificial Sequence: Synthetic peptide
  Seed: SIGKVCRTLLAKSVF
SIGKVIRTILSKSFF

SEQ ID NO: 277118 - protein, 15 aa, Artificial Sequence
  Description of Artificial Sequence: Synthetic peptide
  Seed: EECLINDPWVLLNAS
EECFINNPWVLVNAS

SEQ ID NO: 277119 - protein, 15 aa, Artificial Sequence
  Description of Artificial Sequence: Synthetic peptide
  Seed: SIGKVCRTLLAKSVF
SIGKVMRTWLAKSVF

SEQ ID NO: 277120 - protein, 15 aa, Artificial Sequence
  Description of Artificial Sequence: Synthetic peptide
  Seed: EECLINDPWVLLNAS
EECIINHPFVLANAS

SEQ ID NO: 277121 - protein, 15 aa, Artificial Sequence
  Description of Artificial Sequence: Synthetic peptide
  Seed: EECLINDPWVLLNAS
EECFINGPFVLTNAS

SEQ ID NO: 277122 - protein, 15 aa, Artificial Sequence
  Description of Artificial Sequence: Synthetic peptide
  Seed: DPWVLLNASWFNSFL
DPFVLNNNSWVNSFL

SEQ ID NO: 277123 - protein, 15 aa, Artificial Sequence
  Description of Artificial Sequence: Synthetic peptide
  Seed: SIGKVCRTLLAKSVF
SIGKVWRTWLAKSIF

SEQ ID NO: 277124 - protein, 15 aa, Artificial Sequence
  Description of Artificial Sequence: Synthetic peptide
  Seed: SIGKVCRTLLAKSVF
SIGKVFRTWLAKSTF

SEQ ID NO: 277125 - protein, 15 aa, Artificial Sequence
  Description of Artificial Sequence: Synthetic peptide
  Seed: SIGKVCRTLLAKSVF
SIGKVYRTFLSKSYF

SEQ ID NO: 277126 - protein, 15 aa, Artificial Sequence
  Description of Artificial Sequence: Synthetic peptide
  Seed: SIGKVCRTLLAKSVF
SIGKVFRTWLPKSVF

SEQ ID NO: 277127 - protein, 15 aa, Artificial Sequence
  Description of Artificial Sequence: Synthetic peptide
  Seed: SIGKVCRTLLAKSVF
SIGKVVRTWLAKSVF

SEQ ID NO: 277128 - protein, 15 aa, Artificial Sequence
  Description of Artificial Sequence: Synthetic peptide
  Seed: SIGKVCRTLLAKSVF
SIGKVIRTALVKSVF

SEQ ID NO: 277129 - protein, 15 aa, Artificial Sequence
  Description of Artificial Sequence: Synthetic peptide
  Seed: SIGKVCRTLLAKSVF
SIGKVFRTFLSKSQF

SEQ ID NO: 277130 - protein, 15 aa, Artificial Sequence
  Description of Artificial Sequence: Synthetic peptide
  Seed: DPWVLLNASWFNSFL
DPWVLFNAFWFNSEL

SEQ ID NO: 277131 - protein, 15 aa, Artificial Sequence
  Description of Artificial Sequence: Synthetic peptide
  Seed: DPWVLLNASWFNSFL
DPWVLFNAFWYNSLL

SEQ ID NO: 277132 - protein, 15 aa, Artificial Sequence
  Description of Artificial Sequence: Synthetic peptide
  Seed: DPWVLLNASWFNSFL
DPWVLLNAQWFNSVL

SEQ ID NO: 277133 - protein, 15 aa, Artificial Sequence
  Description of Artificial Sequence: Synthetic peptide
  Seed: SIGKVCRTLLAKSVF
SIGKVLRTMLVKSYF

SEQ ID NO: 277134 - protein, 15 aa, Artificial Sequence
  Description of Artificial Sequence: Synthetic peptide
  Seed: DPWVLLNASWFNSFL
DPWVLFNAWWMNSLL

SEQ ID NO: 277135 - protein, 15 aa, Artificial Sequence
  Description of Artificial Sequence: Synthetic peptide
  Seed: SIGKVCRTLLAKSVF
SIGKMCRALIAKAVF

SEQ ID NO: 277136 - protein, 15 aa, Artificial Sequence
  Description of Artificial Sequence: Synthetic peptide
  Seed: SIGKVCRTLLAKSVF
SIGKVIRTWLAKSSF

SEQ ID NO: 277137 - protein, 15 aa, Artificial Sequence
  Description of Artificial Sequence: Synthetic peptide
  Seed: SIGKVCRTLLAKSVF
SIGKVWRTLLLKSAF

SEQ ID NO: 277138 - protein, 15 aa, Artificial Sequence
  Description of Artificial Sequence: Synthetic peptide
  Seed: SIGKVCRTLLAKSVF
SIGKVYRTYLSKSIF

SEQ ID NO: 277139 - protein, 15 aa, Artificial Sequence
  Description of Artificial Sequence: Synthetic peptide
  Seed: SIGKVCRTLLAKSVF
SIGKICRALIAKAVF

SEQ ID NO: 277140 - protein, 15 aa, Artificial Sequence
  Description of Artificial Sequence: Synthetic peptide
  Seed: EECLINDPWVLLNAS
EECFINKPFVLSNAS

SEQ ID NO: 277141 - protein, 15 aa, Artificial Sequence
  Description of Artificial Sequence: Synthetic peptide
  Seed: SIGKVCRTLLAKSVF
SIGKVFRTLLEKSLF

SEQ ID NO: 277142 - protein, 15 aa, Artificial Sequence
  Description of Artificial Sequence: Synthetic peptide
  Seed: SIGKVCRTLLAKSVF
SIGKICRALIAKSVF

SEQ ID NO: 277143 - protein, 15 aa, Artificial Sequence
  Description of Artificial Sequence: Synthetic peptide
  Seed: EECLINDPWVLLNAS
EECIINFPMVLVNAS

SEQ ID NO: 277144 - protein, 15 aa, Artificial Sequence
  Description of Artificial Sequence: Synthetic peptide
  Seed: SIGKVCRTLLAKSVF
SIGKYCRILTAKAVF

SEQ ID NO: 277145 - protein, 15 aa, Artificial Sequence
  Description of Artificial Sequence: Synthetic peptide
  Seed: SIGKVCRTLLAKSVF
SIGKVIRTVLSKSYF

SEQ ID NO: 277146 - protein, 15 aa, Artificial Sequence
  Description of Artificial Sequence: Synthetic peptide
  Seed: DPWVLLNASWFNSFL
DPWVLFNAAWMNSVL

SEQ ID NO: 277147 - protein, 15 aa, Artificial Sequence
  Description of Artificial Sequence: Synthetic peptide
  Seed: SIGKVCRTLLAKSVF
SIGKVFRTGLIKSSF

SEQ ID NO: 277148 - protein, 15 aa, Artificial Sequence
  Description of Artificial Sequence: Synthetic peptide
  Seed: SIGKVCRTLLAKSVF
SIGKMCRALAAKAVF

SEQ ID NO: 277149 - protein, 15 aa, Artificial Sequence
  Description of Artificial Sequence: Synthetic peptide
  Seed: SIGKVCRTLLAKSVF
SIGKICRALAAKAVF

SEQ ID NO: 277150 - protein, 15 aa, Artificial Sequence
  Description of Artificial Sequence: Synthetic peptide
  Seed: SIGKVCRTLLAKSVF
SIGKVYRTGLSKSFF

SEQ ID NO: 277151 - protein, 15 aa, Artificial Sequence
  Description of Artificial Sequence: Synthetic peptide
  Seed: SIGKVCRTLLAKSVF
SIGKFCRNLAAKIVF

SEQ ID NO: 277152 - protein, 15 aa, Artificial Sequence
  Description of Artificial Sequence: Synthetic peptide
  Seed: HIHIFSFTGEEMATK
HIHIFSFAGAEMATK

SEQ ID NO: 277153 - protein, 15 aa, Artificial Sequence
  Description of Artificial Sequence: Synthetic peptide
  Seed: HIHIFSFTGEEMATK
HIHIFSFAGAEMFTK

SEQ ID NO: 277154 - protein, 15 aa, Artificial Sequence
  Description of Artificial Sequence: Synthetic peptide
  Seed: HIHIFSFTGEEMATK
HIHIFSFAGAEMITK

SEQ ID NO: 277155 - protein, 15 aa, Artificial Sequence
  Description of Artificial Sequence: Synthetic peptide
  Seed: HIHIFSFTGEEMATK
HIHIFSFAGAEMLTK

SEQ ID NO: 277156 - protein, 15 aa, Artificial Sequence
  Description of Artificial Sequence: Synthetic peptide
  Seed: HIHIFSFTGEEMATK
HIHIFSFAGAEMMTK

SEQ ID NO: 277157 - protein, 15 aa, Artificial Sequence
  Description of Artificial Sequence: Synthetic peptide
  Seed: HIHIFSFTGEEMATK
HIHIFSFAGAEMTTK

SEQ ID NO: 277158 - protein, 15 aa, Artificial Sequence
  Description of Artificial Sequence: Synthetic peptide
  Seed: HIHIFSFTGEEMATK
HIHIFSFAGAEMVTK

SEQ ID NO: 277159 - protein, 15 aa, Artificial Sequence
  Description of Artificial Sequence: Synthetic peptide
  Seed: HIHIFSFTGEEMATK
HIHIFSFAGAEMYTK

SEQ ID NO: 277160 - protein, 15 aa, Artificial Sequence
  Description of Artificial Sequence: Synthetic peptide
  Seed: HIHIFSFTGEEMATK
HIHIFSFAGGEMITK

SEQ ID NO: 277161 - protein, 15 aa, Artificial Sequence
  Description of Artificial Sequence: Synthetic peptide
  Seed: HIHIFSFTGEEMATK
HIHIFSFAGGEMLTK

SEQ ID NO: 277162 - protein, 15 aa, Artificial Sequence
  Description of Artificial Sequence: Synthetic peptide
  Seed: HIHIFSFTGEEMATK
HIHIFSFAGGEMMTK

SEQ ID NO: 277163 - protein, 15 aa, Artificial Sequence
  Description of Artificial Sequence: Synthetic peptide
  Seed: HIHIFSFTGEEMATK
HIHIFSFAGGEMVTK

SEQ ID NO: 277164 - protein, 15 aa, Artificial Sequence
  Description of Artificial Sequence: Synthetic peptide
  Seed: HIHIFSFTGEEMATK
HIHIFSFAGNEMITK

SEQ ID NO: 277165 - protein, 15 aa, Artificial Sequence
  Description of Artificial Sequence: Synthetic peptide
  Seed: HIHIFSFTGEEMATK
HIHIFSFAGNEMLTK

SEQ ID NO: 277166 - protein, 15 aa, Artificial Sequence
  Description of Artificial Sequence: Synthetic peptide
  Seed: HIHIFSFTGEEMATK
HIHIFSFAGNEMVTK

SEQ ID NO: 277167 - protein, 15 aa, Artificial Sequence
  Description of Artificial Sequence: Synthetic peptide
  Seed: HIHIFSFTGEEMATK
HIHIFSFAGPEMITK

SEQ ID NO: 277168 - protein, 15 aa, Artificial Sequence
  Description of Artificial Sequence: Synthetic peptide
  Seed: HIHIFSFTGEEMATK
HIHIFSFAGPEMLTK

SEQ ID NO: 277169 - protein, 15 aa, Artificial Sequence
  Description of Artificial Sequence: Synthetic peptide
  Seed: HIHIFSFTGEEMATK
HIHIFSFAGPEMMTK

SEQ ID NO: 277170 - protein, 15 aa, Artificial Sequence
  Description of Artificial Sequence: Synthetic peptide
  Seed: HIHIFSFTGEEMATK
HIHIFSFAGPEMVTK

SEQ ID NO: 277171 - protein, 15 aa, Artificial Sequence
  Description of Artificial Sequence: Synthetic peptide
  Seed: HIHIFSFTGEEMATK
HIHIFSFAGSEMATK

SEQ ID NO: 277172 - protein, 15 aa, Artificial Sequence
  Description of Artificial Sequence: Synthetic peptide
  Seed: HIHIFSFTGEEMATK
HIHIFSFAGSEMFTK

SEQ ID NO: 277173 - protein, 15 aa, Artificial Sequence
  Description of Artificial Sequence: Synthetic peptide
  Seed: HIHIFSFTGEEMATK
HIHIFSFAGSEMITK

SEQ ID NO: 277174 - protein, 15 aa, Artificial Sequence
  Description of Artificial Sequence: Synthetic peptide
  Seed: HIHIFSFTGEEMATK
HIHIFSFAGSEMLTK

SEQ ID NO: 277175 - protein, 15 aa, Artificial Sequence
  Description of Artificial Sequence: Synthetic peptide
  Seed: HIHIFSFTGEEMATK
HIHIFSFAGSEMMTK

SEQ ID NO: 277176 - protein, 15 aa, Artificial Sequence
  Description of Artificial Sequence: Synthetic peptide
  Seed: HIHIFSFTGEEMATK
HIHIFSFAGSEMTTK

SEQ ID NO: 277177 - protein, 15 aa, Artificial Sequence
  Description of Artificial Sequence: Synthetic peptide
  Seed: HIHIFSFTGEEMATK
HIHIFSFAGSEMVTK

SEQ ID NO: 277178 - protein, 15 aa, Artificial Sequence
  Description of Artificial Sequence: Synthetic peptide
  Seed: HIHIFSFTGEEMATK
HIHIFSFAGTEMITK

SEQ ID NO: 277179 - protein, 15 aa, Artificial Sequence
  Description of Artificial Sequence: Synthetic peptide
  Seed: HIHIFSFTGEEMATK
HIHIFSFAGTEMLTK

SEQ ID NO: 277180 - protein, 15 aa, Artificial Sequence
  Description of Artificial Sequence: Synthetic peptide
  Seed: HIHIFSFTGEEMATK
HIHIFSFAGTEMMTK

SEQ ID NO: 277181 - protein, 15 aa, Artificial Sequence
  Description of Artificial Sequence: Synthetic peptide
  Seed: HIHIFSFTGEEMATK
HIHIFSFAGTEMVTK

SEQ ID NO: 277182 - protein, 15 aa, Artificial Sequence
  Description of Artificial Sequence: Synthetic peptide
  Seed: HIHIFSFTGEEMATK
HIHIFSFAGVEMITK

SEQ ID NO: 277183 - protein, 15 aa, Artificial Sequence
  Description of Artificial Sequence: Synthetic peptide
  Seed: HIHIFSFTGEEMATK
HIHIFSFAGVEMVTK

SEQ ID NO: 277184 - protein, 15 aa, Artificial Sequence
  Description of Artificial Sequence: Synthetic peptide
  Seed: HIHIFSFTGEEMATK
HIHIFSFCGAEMITK

SEQ ID NO: 277185 - protein, 15 aa, Artificial Sequence
  Description of Artificial Sequence: Synthetic peptide
  Seed: HIHIFSFTGEEMATK
HIHIFSFEGFEMITK

SEQ ID NO: 277186 - protein, 15 aa, Artificial Sequence
  Description of Artificial Sequence: Synthetic peptide
  Seed: HIHIFSFTGEEMATK
HIHIFSFEGFEMLTK

SEQ ID NO: 277187 - protein, 15 aa, Artificial Sequence
  Description of Artificial Sequence: Synthetic peptide
  Seed: HIHIFSFTGEEMATK
HIHIFSFEGFEMVTK

SEQ ID NO: 277188 - protein, 15 aa, Artificial Sequence
  Description of Artificial Sequence: Synthetic peptide
  Seed: HIHIFSFTGEEMATK
HIHIFSFFGAEMITK

SEQ ID NO: 277189 - protein, 15 aa, Artificial Sequence
  Description of Artificial Sequence: Synthetic peptide
  Seed: HIHIFSFTGEEMATK
HIHIFSFFGAEMVTK

SEQ ID NO: 277190 - protein, 15 aa, Artificial Sequence
  Description of Artificial Sequence: Synthetic peptide
  Seed: HIHIFSFTGEEMATK
HIHIFSFFGSEMITK

SEQ ID NO: 277191 - protein, 15 aa, Artificial Sequence
  Description of Artificial Sequence: Synthetic peptide
  Seed: HIHIFSFTGEEMATK
HIHIFSFFGSEMVTK

SEQ ID NO: 277192 - protein, 15 aa, Artificial Sequence
  Description of Artificial Sequence: Synthetic peptide
  Seed: HIHIFSFTGEEMATK
HIHIFSFGGAEMITK

SEQ ID NO: 277193 - protein, 15 aa, Artificial Sequence
  Description of Artificial Sequence: Synthetic peptide
  Seed: HIHIFSFTGEEMATK
HIHIFSFGGAEMLTK

SEQ ID NO: 277194 - protein, 15 aa, Artificial Sequence
  Description of Artificial Sequence: Synthetic peptide
  Seed: HIHIFSFTGEEMATK
HIHIFSFGGAEMVTK

SEQ ID NO: 277195 - protein, 15 aa, Artificial Sequence
  Description of Artificial Sequence: Synthetic peptide
  Seed: HIHIFSFTGEEMATK
HIHIFSFHGAEMFTK

SEQ ID NO: 277196 - protein, 15 aa, Artificial Sequence
  Description of Artificial Sequence: Synthetic peptide
  Seed: HIHIFSFTGEEMATK
HIHIFSFHGAEMITK

SEQ ID NO: 277197 - protein, 15 aa, Artificial Sequence
  Description of Artificial Sequence: Synthetic peptide
  Seed: HIHIFSFTGEEMATK
HIHIFSFHGAEMLTK

SEQ ID NO: 277198 - protein, 15 aa, Artificial Sequence
  Description of Artificial Sequence: Synthetic peptide
  Seed: HIHIFSFTGEEMATK
HIHIFSFHGAEMMTK

SEQ ID NO: 277199 - protein, 15 aa, Artificial Sequence
  Description of Artificial Sequence: Synthetic peptide
  Seed: HIHIFSFTGEEMATK
HIHIFSFHGAEMVTK

SEQ ID NO: 277200 - protein, 15 aa, Artificial Sequence
  Description of Artificial Sequence: Synthetic peptide
  Seed: HIHIFSFTGEEMATK
HIHIFSFHGGEMITK

SEQ ID NO: 277201 - protein, 15 aa, Artificial Sequence
  Description of Artificial Sequence: Synthetic peptide
  Seed: HIHIFSFTGEEMATK
HIHIFSFHGSEMITK

SEQ ID NO: 277202 - protein, 15 aa, Artificial Sequence
  Description of Artificial Sequence: Synthetic peptide
  Seed: HIHIFSFTGEEMATK
HIHIFSFHGSEMLTK

SEQ ID NO: 277203 - protein, 15 aa, Artificial Sequence
  Description of Artificial Sequence: Synthetic peptide
  Seed: HIHIFSFTGEEMATK
HIHIFSFHGSEMVTK

SEQ ID NO: 277204 - protein, 15 aa, Artificial Sequence
  Description of Artificial Sequence: Synthetic peptide
  Seed: HIHIFSFTGEEMATK
HIHIFSFIGAEMFTK

SEQ ID NO: 277205 - protein, 15 aa, Artificial Sequence
  Description of Artificial Sequence: Synthetic peptide
  Seed: HIHIFSFTGEEMATK
HIHIFSFIGAEMITK

SEQ ID NO: 277206 - protein, 15 aa, Artificial Sequence
  Description of Artificial Sequence: Synthetic peptide
  Seed: HIHIFSFTGEEMATK
HIHIFSFIGAEMMTK

SEQ ID NO: 277207 - protein, 15 aa, Artificial Sequence
  Description of Artificial Sequence: Synthetic peptide
  Seed: HIHIFSFTGEEMATK
HIHIFSFIGAEMVTK

SEQ ID NO: 277208 - protein, 15 aa, Artificial Sequence
  Description of Artificial Sequence: Synthetic peptide
  Seed: HIHIFSFTGEEMATK
HIHIFSFIGGEMITK

SEQ ID NO: 277209 - protein, 15 aa, Artificial Sequence
  Description of Artificial Sequence: Synthetic peptide
  Seed: HIHIFSFTGEEMATK
HIHIFSFIGGEMLTK

SEQ ID NO: 277210 - protein, 15 aa, Artificial Sequence
  Description of Artificial Sequence: Synthetic peptide
  Seed: HIHIFSFTGEEMATK
HIHIFSFIGGEMVTK

SEQ ID NO: 277211 - protein, 15 aa, Artificial Sequence
  Description of Artificial Sequence: Synthetic peptide
  Seed: HIHIFSFTGEEMATK
HIHIFSFIGNEMITK

SEQ ID NO: 277212 - protein, 15 aa, Artificial Sequence
  Description of Artificial Sequence: Synthetic peptide
  Seed: HIHIFSFTGEEMATK
HIHIFSFIGNEMLTK

SEQ ID NO: 277213 - protein, 15 aa, Artificial Sequence
  Description of Artificial Sequence: Synthetic peptide
  Seed: HIHIFSFTGEEMATK
HIHIFSFIGNEMVTK

SEQ ID NO: 277214 - protein, 15 aa, Artificial Sequence
  Description of Artificial Sequence: Synthetic peptide
  Seed: HIHIFSFTGEEMATK
HIHIFSFIGPEMITK

SEQ ID NO: 277215 - protein, 15 aa, Artificial Sequence
  Description of Artificial Sequence: Synthetic peptide
  Seed: HIHIFSFTGEEMATK
HIHIFSFIGPEMLTK

SEQ ID NO: 277216 - protein, 15 aa, Artificial Sequence
  Description of Artificial Sequence: Synthetic peptide
  Seed: HIHIFSFTGEEMATK
HIHIFSFIGPEMVTK

SEQ ID NO: 277217 - protein, 15 aa, Artificial Sequence
  Description of Artificial Sequence: Synthetic peptide
  Seed: HIHIFSFTGEEMATK
HIHIFSFIGSEMFTK

SEQ ID NO: 277218 - protein, 15 aa, Artificial Sequence
  Description of Artificial Sequence: Synthetic peptide
  Seed: HIHIFSFTGEEMATK
HIHIFSFIGSEMITK

SEQ ID NO: 277219 - protein, 15 aa, Artificial Sequence
  Description of Artificial Sequence: Synthetic peptide
  Seed: HIHIFSFTGEEMATK
HIHIFSFIGSEMLTK

SEQ ID NO: 277220 - protein, 15 aa, Artificial Sequence
  Description of Artificial Sequence: Synthetic peptide
  Seed: HIHIFSFTGEEMATK
HIHIFSFIGSEMMTK

SEQ ID NO: 277221 - protein, 15 aa, Artificial Sequence
  Description of Artificial Sequence: Synthetic peptide
  Seed: HIHIFSFTGEEMATK
HIHIFSFIGSEMVTK

SEQ ID NO: 277222 - protein, 15 aa, Artificial Sequence
  Description of Artificial Sequence: Synthetic peptide
  Seed: HIHIFSFTGEEMATK
HIHIFSFIGTEMITK

SEQ ID NO: 277223 - protein, 15 aa, Artificial Sequence
  Description of Artificial Sequence: Synthetic peptide
  Seed: HIHIFSFTGEEMATK
HIHIFSFIGTEMLTK

SEQ ID NO: 277224 - protein, 15 aa, Artificial Sequence
  Description of Artificial Sequence: Synthetic peptide
  Seed: HIHIFSFTGEEMATK
HIHIFSFIGTEMVTK

SEQ ID NO: 277225 - protein, 15 aa, Artificial Sequence
  Description of Artificial Sequence: Synthetic peptide
  Seed: HIHIFSFTGEEMATK
HIHIFSFLGAEMITK

SEQ ID NO: 277226 - protein, 15 aa, Artificial Sequence
  Description of Artificial Sequence: Synthetic peptide
  Seed: HIHIFSFTGEEMATK
HIHIFSFLGSEMITK

SEQ ID NO: 277227 - protein, 15 aa, Artificial Sequence
  Description of Artificial Sequence: Synthetic peptide
  Seed: HIHIFSFTGEEMATK
HIHIFSFLGSEMVTK

SEQ ID NO: 277228 - protein, 15 aa, Artificial Sequence
  Description of Artificial Sequence: Synthetic peptide
  Seed: HIHIFSFTGEEMATK
HIHIFSFMGAEMITK

SEQ ID NO: 277229 - protein, 15 aa, Artificial Sequence
  Description of Artificial Sequence: Synthetic peptide
  Seed: HIHIFSFTGEEMATK
HIHIFSFMGAEMVTK

SEQ ID NO: 277230 - protein, 15 aa, Artificial Sequence
  Description of Artificial Sequence: Synthetic peptide
  Seed: HIHIFSFTGEEMATK
HIHIFSFMGSEMITK

SEQ ID NO: 277231 - protein, 15 aa, Artificial Sequence
  Description of Artificial Sequence: Synthetic peptide
  Seed: HIHIFSFTGEEMATK
HIHIFSFMGSEMVTK

SEQ ID NO: 277232 - protein, 15 aa, Artificial Sequence
  Description of Artificial Sequence: Synthetic peptide
  Seed: HIHIFSFTGEEMATK
HIHIFSFSGAEMATK

SEQ ID NO: 277233 - protein, 15 aa, Artificial Sequence
  Description of Artificial Sequence: Synthetic peptide
  Seed: HIHIFSFTGEEMATK
HIHIFSFSGAEMFTK

SEQ ID NO: 277234 - protein, 15 aa, Artificial Sequence
  Description of Artificial Sequence: Synthetic peptide
  Seed: HIHIFSFTGEEMATK
HIHIFSFSGAEMITK

SEQ ID NO: 277235 - protein, 15 aa, Artificial Sequence
  Description of Artificial Sequence: Synthetic peptide
  Seed: HIHIFSFTGEEMATK
HIHIFSFSGAEMLTK

SEQ ID NO: 277236 - protein, 15 aa, Artificial Sequence
  Description of Artificial Sequence: Synthetic peptide
  Seed: HIHIFSFTGEEMATK
HIHIFSFSGAEMMTK

SEQ ID NO: 277237 - protein, 15 aa, Artificial Sequence
  Description of Artificial Sequence: Synthetic peptide
  Seed: HIHIFSFTGEEMATK
HIHIFSFSGAEMTTK

SEQ ID NO: 277238 - protein, 15 aa, Artificial Sequence
  Description of Artificial Sequence: Synthetic peptide
  Seed: HIHIFSFTGEEMATK
HIHIFSFSGAEMVTK

SEQ ID NO: 277239 - protein, 15 aa, Artificial Sequence
  Description of Artificial Sequence: Synthetic peptide
  Seed: HIHIFSFTGEEMATK
HIHIFSFSGAEMYTK

SEQ ID NO: 277240 - protein, 15 aa, Artificial Sequence
  Description of Artificial Sequence: Synthetic peptide
  Seed: HIHIFSFTGEEMATK
HIHIFSFSGFEMITK

SEQ ID NO: 277241 - protein, 15 aa, Artificial Sequence
  Description of Artificial Sequence: Synthetic peptide
  Seed: HIHIFSFTGEEMATK
HIHIFSFSGFEMLTK

SEQ ID NO: 277242 - protein, 15 aa, Artificial Sequence
  Description of Artificial Sequence: Synthetic peptide
  Seed: HIHIFSFTGEEMATK
HIHIFSFSGFEMVTK

SEQ ID NO: 277243 - protein, 15 aa, Artificial Sequence
  Description of Artificial Sequence: Synthetic peptide
  Seed: HIHIFSFTGEEMATK
HIHIFSFSGGEMFTK

SEQ ID NO: 277244 - protein, 15 aa, Artificial Sequence
  Description of Artificial Sequence: Synthetic peptide
  Seed: HIHIFSFTGEEMATK
HIHIFSFSGGEMITK

SEQ ID NO: 277245 - protein, 15 aa, Artificial Sequence
  Description of Artificial Sequence: Synthetic peptide
  Seed: HIHIFSFTGEEMATK
HIHIFSFSGGEMLTK

SEQ ID NO: 277246 - protein, 15 aa, Artificial Sequence
  Description of Artificial Sequence: Synthetic peptide
  Seed: HIHIFSFTGEEMATK
HIHIFSFSGGEMMTK

SEQ ID NO: 277247 - protein, 15 aa, Artificial Sequence
  Description of Artificial Sequence: Synthetic peptide
  Seed: HIHIFSFTGEEMATK
HIHIFSFSGGEMVTK

SEQ ID NO: 277248 - protein, 15 aa, Artificial Sequence
  Description of Artificial Sequence: Synthetic peptide
  Seed: HIHIFSFTGEEMATK
HIHIFSFSGIEMITK

SEQ ID NO: 277249 - protein, 15 aa, Artificial Sequence
  Description of Artificial Sequence: Synthetic peptide
  Seed: HIHIFSFTGEEMATK
HIHIFSFSGIEMVTK

SEQ ID NO: 277250 - protein, 15 aa, Artificial Sequence
  Description of Artificial Sequence: Synthetic peptide
  Seed: HIHIFSFTGEEMATK
HIHIFSFSGNEMITK

SEQ ID NO: 277251 - protein, 15 aa, Artificial Sequence
  Description of Artificial Sequence: Synthetic peptide
  Seed: HIHIFSFTGEEMATK
HIHIFSFSGNEMLTK

SEQ ID NO: 277252 - protein, 15 aa, Artificial Sequence
  Description of Artificial Sequence: Synthetic peptide
  Seed: HIHIFSFTGEEMATK
HIHIFSFSGNEMVTK

SEQ ID NO: 277253 - protein, 15 aa, Artificial Sequence
  Description of Artificial Sequence: Synthetic peptide
  Seed: HIHIFSFTGEEMATK
HIHIFSFSGPEMITK

SEQ ID NO: 277254 - protein, 15 aa, Artificial Sequence
  Description of Artificial Sequence: Synthetic peptide
  Seed: HIHIFSFTGEEMATK
HIHIFSFSGPEMLTK

SEQ ID NO: 277255 - protein, 15 aa, Artificial Sequence
  Description of Artificial Sequence: Synthetic peptide
  Seed: HIHIFSFTGEEMATK
HIHIFSFSGPEMVTK

SEQ ID NO: 277256 - protein, 15 aa, Artificial Sequence
  Description of Artificial Sequence: Synthetic peptide
  Seed: HIHIFSFTGEEMATK
HIHIFSFSGSEMATK

SEQ ID NO: 277257 - protein, 15 aa, Artificial Sequence
  Description of Artificial Sequence: Synthetic peptide
  Seed: HIHIFSFTGEEMATK
HIHIFSFSGSEMFTK

SEQ ID NO: 277258 - protein, 15 aa, Artificial Sequence
  Description of Artificial Sequence: Synthetic peptide
  Seed: HIHIFSFTGEEMATK
HIHIFSFSGSEMITK

SEQ ID NO: 277259 - protein, 15 aa, Artificial Sequence
  Description of Artificial Sequence: Synthetic peptide
  Seed: HIHIFSFTGEEMATK
HIHIFSFSGSEMLTK

SEQ ID NO: 277260 - protein, 15 aa, Artificial Sequence
  Description of Artificial Sequence: Synthetic peptide
  Seed: HIHIFSFTGEEMATK
HIHIFSFSGSEMMTK

SEQ ID NO: 277261 - protein, 15 aa, Artificial Sequence
  Description of Artificial Sequence: Synthetic peptide
  Seed: HIHIFSFTGEEMATK
HIHIFSFSGSEMTTK

SEQ ID NO: 277262 - protein, 15 aa, Artificial Sequence
  Description of Artificial Sequence: Synthetic peptide
  Seed: HIHIFSFTGEEMATK
HIHIFSFSGSEMVTK

SEQ ID NO: 277263 - protein, 15 aa, Artificial Sequence
  Description of Artificial Sequence: Synthetic peptide
  Seed: HIHIFSFTGEEMATK
HIHIFSFSGSEMYTK

SEQ ID NO: 277264 - protein, 15 aa, Artificial Sequence
  Description of Artificial Sequence: Synthetic peptide
  Seed: HIHIFSFTGEEMATK
HIHIFSFSGTEMFTK

SEQ ID NO: 277265 - protein, 15 aa, Artificial Sequence
  Description of Artificial Sequence: Synthetic peptide
  Seed: HIHIFSFTGEEMATK
HIHIFSFSGTEMITK

SEQ ID NO: 277266 - protein, 15 aa, Artificial Sequence
  Description of Artificial Sequence: Synthetic peptide
  Seed: HIHIFSFTGEEMATK
HIHIFSFSGTEMLTK

SEQ ID NO: 277267 - protein, 15 aa, Artificial Sequence
  Description of Artificial Sequence: Synthetic peptide
  Seed: HIHIFSFTGEEMATK
HIHIFSFSGTEMMTK

SEQ ID NO: 277268 - protein, 15 aa, Artificial Sequence
  Description of Artificial Sequence: Synthetic peptide
  Seed: HIHIFSFTGEEMATK
HIHIFSFSGTEMVTK

SEQ ID NO: 277269 - protein, 15 aa, Artificial Sequence
  Description of Artificial Sequence: Synthetic peptide
  Seed: HIHIFSFTGEEMATK
HIHIFSFSGVEMITK

SEQ ID NO: 277270 - protein, 15 aa, Artificial Sequence
  Description of Artificial Sequence: Synthetic peptide
  Seed: HIHIFSFTGEEMATK
HIHIFSFSGVEMLTK

SEQ ID NO: 277271 - protein, 15 aa, Artificial Sequence
  Description of Artificial Sequence: Synthetic peptide
  Seed: HIHIFSFTGEEMATK
HIHIFSFSGVEMVTK

SEQ ID NO: 277272 - protein, 15 aa, Artificial Sequence
  Description of Artificial Sequence: Synthetic peptide
  Seed: HIHIFSFTGEEMATK
HIHIFSFTGAEMATK

SEQ ID NO: 277273 - protein, 15 aa, Artificial Sequence
  Description of Artificial Sequence: Synthetic peptide
  Seed: HIHIFSFTGEEMATK
HIHIFSFTGAEMFTK

SEQ ID NO: 277274 - protein, 15 aa, Artificial Sequence
  Description of Artificial Sequence: Synthetic peptide
  Seed: HIHIFSFTGEEMATK
HIHIFSFTGAEMITK

SEQ ID NO: 277275 - protein, 15 aa, Artificial Sequence
  Description of Artificial Sequence: Synthetic peptide
  Seed: HIHIFSFTGEEMATK
HIHIFSFTGAEMMTK

SEQ ID NO: 277276 - protein, 15 aa, Artificial Sequence
  Description of Artificial Sequence: Synthetic peptide
  Seed: HIHIFSFTGEEMATK
HIHIFSFTGAEMSTK

SEQ ID NO: 277277 - protein, 15 aa, Artificial Sequence
  Description of Artificial Sequence: Synthetic peptide
  Seed: HIHIFSFTGEEMATK
HIHIFSFTGAEMTTK

SEQ ID NO: 277278 - protein, 15 aa, Artificial Sequence
  Description of Artificial Sequence: Synthetic peptide
  Seed: HIHIFSFTGEEMATK
HIHIFSFTGAEMVTK

SEQ ID NO: 277279 - protein, 15 aa, Artificial Sequence
  Description of Artificial Sequence: Synthetic peptide
  Seed: HIHIFSFTGEEMATK
HIHIFSFTGAEMYTK

SEQ ID NO: 277280 - protein, 15 aa, Artificial Sequence
  Description of Artificial Sequence: Synthetic peptide
  Seed: HIHIFSFTGEEMATK
HIHIFSFTGFEMFTK

SEQ ID NO: 277281 - protein, 15 aa, Artificial Sequence
  Description of Artificial Sequence: Synthetic peptide
  Seed: HIHIFSFTGEEMATK
HIHIFSFTGFEMLTK

SEQ ID NO: 277282 - protein, 15 aa, Artificial Sequence
  Description of Artificial Sequence: Synthetic peptide
  Seed: HIHIFSFTGEEMATK
HIHIFSFTGFEMMTK

SEQ ID NO: 277283 - protein, 15 aa, Artificial Sequence
  Description of Artificial Sequence: Synthetic peptide
  Seed: HIHIFSFTGEEMATK
HIHIFSFTGFEMVTK

SEQ ID NO: 277284 - protein, 15 aa, Artificial Sequence
  Description of Artificial Sequence: Synthetic peptide
  Seed: HIHIFSFTGEEMATK
HIHIFSFTGGEMFTK

SEQ ID NO: 277285 - protein, 15 aa, Artificial Sequence
  Description of Artificial Sequence: Synthetic peptide
  Seed: HIHIFSFTGEEMATK
HIHIFSFTGGEMITK

SEQ ID NO: 277286 - protein, 15 aa, Artificial Sequence
  Description of Artificial Sequence: Synthetic peptide
  Seed: HIHIFSFTGEEMATK
HIHIFSFTGGEMLTK

SEQ ID NO: 277287 - protein, 15 aa, Artificial Sequence
  Description of Artificial Sequence: Synthetic peptide
  Seed: HIHIFSFTGEEMATK
HIHIFSFTGGEMMTK

SEQ ID NO: 277288 - protein, 15 aa, Artificial Sequence
  Description of Artificial Sequence: Synthetic peptide
  Seed: HIHIFSFTGEEMATK
HIHIFSFTGGEMVTK

SEQ ID NO: 277289 - protein, 15 aa, Artificial Sequence
  Description of Artificial Sequence: Synthetic peptide
  Seed: HIHIFSFTGEEMATK
HIHIFSFTGIEMITK

SEQ ID NO: 277290 - protein, 15 aa, Artificial Sequence
  Description of Artificial Sequence: Synthetic peptide
  Seed: HIHIFSFTGEEMATK
HIHIFSFTGIEMLTK

SEQ ID NO: 277291 - protein, 15 aa, Artificial Sequence
  Description of Artificial Sequence: Synthetic peptide
  Seed: HIHIFSFTGEEMATK
HIHIFSFTGIEMVTK

SEQ ID NO: 277292 - protein, 15 aa, Artificial Sequence
  Description of Artificial Sequence: Synthetic peptide
  Seed: HIHIFSFTGEEMATK
HIHIFSFTGNEMFTK

SEQ ID NO: 277293 - protein, 15 aa, Artificial Sequence
  Description of Artificial Sequence: Synthetic peptide
  Seed: HIHIFSFTGEEMATK
HIHIFSFTGNEMITK

SEQ ID NO: 277294 - protein, 15 aa, Artificial Sequence
  Description of Artificial Sequence: Synthetic peptide
  Seed: HIHIFSFTGEEMATK
HIHIFSFTGNEMLTK

SEQ ID NO: 277295 - protein, 15 aa, Artificial Sequence
  Description of Artificial Sequence: Synthetic peptide
  Seed: HIHIFSFTGEEMATK
HIHIFSFTGNEMMTK

SEQ ID NO: 277296 - protein, 15 aa, Artificial Sequence
  Description of Artificial Sequence: Synthetic peptide
  Seed: HIHIFSFTGEEMATK
HIHIFSFTGNEMVTK

SEQ ID NO: 277297 - protein, 15 aa, Artificial Sequence
  Description of Artificial Sequence: Synthetic peptide
  Seed: HIHIFSFTGEEMATK
HIHIFSFTGPEMFTK

SEQ ID NO: 277298 - protein, 15 aa, Artificial Sequence
  Description of Artificial Sequence: Synthetic peptide
  Seed: HIHIFSFTGEEMATK
HIHIFSFTGPEMITK

SEQ ID NO: 277299 - protein, 15 aa, Artificial Sequence
  Description of Artificial Sequence: Synthetic peptide
  Seed: HIHIFSFTGEEMATK
HIHIFSFTGPEMLTK

SEQ ID NO: 277300 - protein, 15 aa, Artificial Sequence
  Description of Artificial Sequence: Synthetic peptide
  Seed: HIHIFSFTGEEMATK
HIHIFSFTGPEMMTK

SEQ ID NO: 277301 - protein, 15 aa, Artificial Sequence
  Description of Artificial Sequence: Synthetic peptide
  Seed: HIHIFSFTGEEMATK
HIHIFSFTGPEMVTK

SEQ ID NO: 277302 - protein, 15 aa, Artificial Sequence
  Description of Artificial Sequence: Synthetic peptide
  Seed: HIHIFSFTGEEMATK
HIHIFSFTGSEMATK

SEQ ID NO: 277303 - protein, 15 aa, Artificial Sequence
  Description of Artificial Sequence: Synthetic peptide
  Seed: HIHIFSFTGEEMATK
HIHIFSFTGSEMFTK

SEQ ID NO: 277304 - protein, 15 aa, Artificial Sequence
  Description of Artificial Sequence: Synthetic peptide
  Seed: HIHIFSFTGEEMATK
HIHIFSFTGSEMITK

SEQ ID NO: 277305 - protein, 15 aa, Artificial Sequence
  Description of Artificial Sequence: Synthetic peptide
  Seed: HIHIFSFTGEEMATK
HIHIFSFTGSEMLTK

SEQ ID NO: 277306 - protein, 15 aa, Artificial Sequence
  Description of Artificial Sequence: Synthetic peptide
  Seed: HIHIFSFTGEEMATK
HIHIFSFTGSEMMTK

SEQ ID NO: 277307 - protein, 15 aa, Artificial Sequence
  Description of Artificial Sequence: Synthetic peptide
  Seed: HIHIFSFTGEEMATK
HIHIFSFTGSEMSTK

SEQ ID NO: 277308 - protein, 15 aa, Artificial Sequence
  Description of Artificial Sequence: Synthetic peptide
  Seed: HIHIFSFTGEEMATK
HIHIFSFTGSEMTTK

SEQ ID NO: 277309 - protein, 15 aa, Artificial Sequence
  Description of Artificial Sequence: Synthetic peptide
  Seed: HIHIFSFTGEEMATK
HIHIFSFTGSEMVTK

SEQ ID NO: 277310 - protein, 15 aa, Artificial Sequence
  Description of Artificial Sequence: Synthetic peptide
  Seed: HIHIFSFTGEEMATK
HIHIFSFTGSEMYTK

SEQ ID NO: 277311 - protein, 15 aa, Artificial Sequence
  Description of Artificial Sequence: Synthetic peptide
  Seed: HIHIFSFTGEEMATK
HIHIFSFTGTEMFTK

SEQ ID NO: 277312 - protein, 15 aa, Artificial Sequence
  Description of Artificial Sequence: Synthetic peptide
  Seed: HIHIFSFTGEEMATK
HIHIFSFTGTEMITK

SEQ ID NO: 277313 - protein, 15 aa, Artificial Sequence
  Description of Artificial Sequence: Synthetic peptide
  Seed: HIHIFSFTGEEMATK
HIHIFSFTGTEMLTK

SEQ ID NO: 277314 - protein, 15 aa, Artificial Sequence
  Description of Artificial Sequence: Synthetic peptide
  Seed: HIHIFSFTGEEMATK
HIHIFSFTGTEMMTK

SEQ ID NO: 277315 - protein, 15 aa, Artificial Sequence
  Description of Artificial Sequence: Synthetic peptide
  Seed: HIHIFSFTGEEMATK
HIHIFSFTGTEMVTK

SEQ ID NO: 277316 - protein, 15 aa, Artificial Sequence
  Description of Artificial Sequence: Synthetic peptide
  Seed: HIHIFSFTGEEMATK
HIHIFSFTGVEMITK

SEQ ID NO: 277317 - protein, 15 aa, Artificial Sequence
  Description of Artificial Sequence: Synthetic peptide
  Seed: HIHIFSFTGEEMATK
HIHIFSFTGVEMLTK

SEQ ID NO: 277318 - protein, 15 aa, Artificial Sequence
  Description of Artificial Sequence: Synthetic peptide
  Seed: HIHIFSFTGEEMATK
HIHIFSFTGVEMMTK

SEQ ID NO: 277319 - protein, 15 aa, Artificial Sequence
  Description of Artificial Sequence: Synthetic peptide
  Seed: HIHIFSFTGEEMATK
HIHIFSFTGVEMVTK

SEQ ID NO: 277320 - protein, 15 aa, Artificial Sequence
  Description of Artificial Sequence: Synthetic peptide
  Seed: HIHIFSFTGEEMATK
HIHIFSFVGAEMATK

SEQ ID NO: 277321 - protein, 15 aa, Artificial Sequence
  Description of Artificial Sequence: Synthetic peptide
  Seed: HIHIFSFTGEEMATK
HIHIFSFVGAEMFTK

SEQ ID NO: 277322 - protein, 15 aa, Artificial Sequence
  Description of Artificial Sequence: Synthetic peptide
  Seed: HIHIFSFTGEEMATK
HIHIFSFVGAEMITK

SEQ ID NO: 277323 - protein, 15 aa, Artificial Sequence
  Description of Artificial Sequence: Synthetic peptide
  Seed: HIHIFSFTGEEMATK
HIHIFSFVGAEMLTK

SEQ ID NO: 277324 - protein, 15 aa, Artificial Sequence
  Description of Artificial Sequence: Synthetic peptide
  Seed: HIHIFSFTGEEMATK
HIHIFSFVGAEMMTK

SEQ ID NO: 277325 - protein, 15 aa, Artificial Sequence
  Description of Artificial Sequence: Synthetic peptide
  Seed: HIHIFSFTGEEMATK
HIHIFSFVGAEMVTK

SEQ ID NO: 277326 - protein, 15 aa, Artificial Sequence
  Description of Artificial Sequence: Synthetic peptide
  Seed: HIHIFSFTGEEMATK
HIHIFSFVGGEMITK

SEQ ID NO: 277327 - protein, 15 aa, Artificial Sequence
  Description of Artificial Sequence: Synthetic peptide
  Seed: HIHIFSFTGEEMATK
HIHIFSFVGGEMLTK

SEQ ID NO: 277328 - protein, 15 aa, Artificial Sequence
  Description of Artificial Sequence: Synthetic peptide
  Seed: HIHIFSFTGEEMATK
HIHIFSFVGGEMMTK

SEQ ID NO: 277329 - protein, 15 aa, Artificial Sequence
  Description of Artificial Sequence: Synthetic peptide
  Seed: HIHIFSFTGEEMATK
HIHIFSFVGGEMVTK

SEQ ID NO: 277330 - protein, 15 aa, Artificial Sequence
  Description of Artificial Sequence: Synthetic peptide
  Seed: HIHIFSFTGEEMATK
HIHIFSFVGNEMITK

SEQ ID NO: 277331 - protein, 15 aa, Artificial Sequence
  Description of Artificial Sequence: Synthetic peptide
  Seed: HIHIFSFTGEEMATK
HIHIFSFVGNEMLTK

SEQ ID NO: 277332 - protein, 15 aa, Artificial Sequence
  Description of Artificial Sequence: Synthetic peptide
  Seed: HIHIFSFTGEEMATK
HIHIFSFVGNEMVTK

SEQ ID NO: 277333 - protein, 15 aa, Artificial Sequence
  Description of Artificial Sequence: Synthetic peptide
  Seed: HIHIFSFTGEEMATK
HIHIFSFVGPEMITK

SEQ ID NO: 277334 - protein, 15 aa, Artificial Sequence
  Description of Artificial Sequence: Synthetic peptide
  Seed: HIHIFSFTGEEMATK
HIHIFSFVGPEMLTK

SEQ ID NO: 277335 - protein, 15 aa, Artificial Sequence
  Description of Artificial Sequence: Synthetic peptide
  Seed: HIHIFSFTGEEMATK
HIHIFSFVGPEMMTK

SEQ ID NO: 277336 - protein, 15 aa, Artificial Sequence
  Description of Artificial Sequence: Synthetic peptide
  Seed: HIHIFSFTGEEMATK
HIHIFSFVGPEMVTK

SEQ ID NO: 277337 - protein, 15 aa, Artificial Sequence
  Description of Artificial Sequence: Synthetic peptide
  Seed: HIHIFSFTGEEMATK
HIHIFSFVGSEMATK

SEQ ID NO: 277338 - protein, 15 aa, Artificial Sequence
  Description of Artificial Sequence: Synthetic peptide
  Seed: HIHIFSFTGEEMATK
HIHIFSFVGSEMFTK

SEQ ID NO: 277339 - protein, 15 aa, Artificial Sequence
  Description of Artificial Sequence: Synthetic peptide
  Seed: HIHIFSFTGEEMATK
HIHIFSFVGSEMITK

SEQ ID NO: 277340 - protein, 15 aa, Artificial Sequence
  Description of Artificial Sequence: Synthetic peptide
  Seed: HIHIFSFTGEEMATK
HIHIFSFVGSEMLTK

SEQ ID NO: 277341 - protein, 15 aa, Artificial Sequence
  Description of Artificial Sequence: Synthetic peptide
  Seed: HIHIFSFTGEEMATK
HIHIFSFVGSEMMTK

SEQ ID NO: 277342 - protein, 15 aa, Artificial Sequence
  Description of Artificial Sequence: Synthetic peptide
  Seed: HIHIFSFTGEEMATK
HIHIFSFVGSEMTTK

SEQ ID NO: 277343 - protein, 15 aa, Artificial Sequence
  Description of Artificial Sequence: Synthetic peptide
  Seed: HIHIFSFTGEEMATK
HIHIFSFVGSEMVTK

SEQ ID NO: 277344 - protein, 15 aa, Artificial Sequence
  Description of Artificial Sequence: Synthetic peptide
  Seed: HIHIFSFTGEEMATK
HIHIFSFVGTEMITK

SEQ ID NO: 277345 - protein, 15 aa, Artificial Sequence
  Description of Artificial Sequence: Synthetic peptide
  Seed: HIHIFSFTGEEMATK
HIHIFSFVGTEMLTK

SEQ ID NO: 277346 - protein, 15 aa, Artificial Sequence
  Description of Artificial Sequence: Synthetic peptide
  Seed: HIHIFSFTGEEMATK
HIHIFSFVGTEMVTK

SEQ ID NO: 277347 - protein, 15 aa, Artificial Sequence
  Description of Artificial Sequence: Synthetic peptide
  Seed: HIHIFSFTGEEMATK
HIHIFSFVGVEMITK

SEQ ID NO: 277348 - protein, 15 aa, Artificial Sequence
  Description of Artificial Sequence: Synthetic peptide
  Seed: HIHIFSFTGEEMATK
HIHIISFAGAEMITK

SEQ ID NO: 277349 - protein, 15 aa, Artificial Sequence
  Description of Artificial Sequence: Synthetic peptide
  Seed: HIHIFSFTGEEMATK
HIHIISFAGAEMLTK

SEQ ID NO: 277350 - protein, 15 aa, Artificial Sequence
  Description of Artificial Sequence: Synthetic peptide
  Seed: HIHIFSFTGEEMATK
HIHIISFAGAEMVTK

SEQ ID NO: 277351 - protein, 15 aa, Artificial Sequence
  Description of Artificial Sequence: Synthetic peptide
  Seed: HIHIFSFTGEEMATK
HIHIISFAGSEMITK

SEQ ID NO: 277352 - protein, 15 aa, Artificial Sequence
  Description of Artificial Sequence: Synthetic peptide
  Seed: HIHIFSFTGEEMATK
HIHIISFAGSEMLTK

SEQ ID NO: 277353 - protein, 15 aa, Artificial Sequence
  Description of Artificial Sequence: Synthetic peptide
  Seed: HIHIFSFTGEEMATK
HIHIISFAGSEMVTK

SEQ ID NO: 277354 - protein, 15 aa, Artificial Sequence
  Description of Artificial Sequence: Synthetic peptide
  Seed: HIHIFSFTGEEMATK
HIHIISFIGAEMITK

SEQ ID NO: 277355 - protein, 15 aa, Artificial Sequence
  Description of Artificial Sequence: Synthetic peptide
  Seed: HIHIFSFTGEEMATK
HIHIISFIGSEMITK

SEQ ID NO: 277356 - protein, 15 aa, Artificial Sequence
  Description of Artificial Sequence: Synthetic peptide
  Seed: HIHIFSFTGEEMATK
HIHIISFSGAEMFTK

SEQ ID NO: 277357 - protein, 15 aa, Artificial Sequence
  Description of Artificial Sequence: Synthetic peptide
  Seed: HIHIFSFTGEEMATK
HIHIISFSGAEMITK

SEQ ID NO: 277358 - protein, 15 aa, Artificial Sequence
  Description of Artificial Sequence: Synthetic peptide
  Seed: HIHIFSFTGEEMATK
HIHIISFSGAEMLTK

SEQ ID NO: 277359 - protein, 15 aa, Artificial Sequence
  Description of Artificial Sequence: Synthetic peptide
  Seed: HIHIFSFTGEEMATK
HIHIISFSGAEMMTK

SEQ ID NO: 277360 - protein, 15 aa, Artificial Sequence
  Description of Artificial Sequence: Synthetic peptide
  Seed: HIHIFSFTGEEMATK
HIHIISFSGAEMVTK

SEQ ID NO: 277361 - protein, 15 aa, Artificial Sequence
  Description of Artificial Sequence: Synthetic peptide
  Seed: HIHIFSFTGEEMATK
HIHIISFSGGEMITK

SEQ ID NO: 277362 - protein, 15 aa, Artificial Sequence
  Description of Artificial Sequence: Synthetic peptide
  Seed: HIHIFSFTGEEMATK
HIHIISFSGSEMITK

SEQ ID NO: 277363 - protein, 15 aa, Artificial Sequence
  Description of Artificial Sequence: Synthetic peptide
  Seed: HIHIFSFTGEEMATK
HIHIISFSGSEMLTK

SEQ ID NO: 277364 - protein, 15 aa, Artificial Sequence
  Description of Artificial Sequence: Synthetic peptide
  Seed: HIHIFSFTGEEMATK
HIHIISFSGSEMMTK

SEQ ID NO: 277365 - protein, 15 aa, Artificial Sequence
  Description of Artificial Sequence: Synthetic peptide
  Seed: HIHIFSFTGEEMATK
HIHIISFSGSEMVTK

SEQ ID NO: 277366 - protein, 15 aa, Artificial Sequence
  Description of Artificial Sequence: Synthetic peptide
  Seed: HIHIFSFTGEEMATK
HIHIISFSGTEMITK

SEQ ID NO: 277367 - protein, 15 aa, Artificial Sequence
  Description of Artificial Sequence: Synthetic peptide
  Seed: HIHIFSFTGEEMATK
HIHIISFTGAEMFTK

SEQ ID NO: 277368 - protein, 15 aa, Artificial Sequence
  Description of Artificial Sequence: Synthetic peptide
  Seed: HIHIFSFTGEEMATK
HIHIISFTGAEMITK

SEQ ID NO: 277369 - protein, 15 aa, Artificial Sequence
  Description of Artificial Sequence: Synthetic peptide
  Seed: HIHIFSFTGEEMATK
HIHIISFTGAEMLTK

SEQ ID NO: 277370 - protein, 15 aa, Artificial Sequence
  Description of Artificial Sequence: Synthetic peptide
  Seed: HIHIFSFTGEEMATK
HIHIISFTGAEMMTK

SEQ ID NO: 277371 - protein, 15 aa, Artificial Sequence
  Description of Artificial Sequence: Synthetic peptide
  Seed: HIHIFSFTGEEMATK
HIHIISFTGAEMVTK

SEQ ID NO: 277372 - protein, 15 aa, Artificial Sequence
  Description of Artificial Sequence: Synthetic peptide
  Seed: HIHIFSFTGEEMATK
HIHIISFTGGEMITK

SEQ ID NO: 277373 - protein, 15 aa, Artificial Sequence
  Description of Artificial Sequence: Synthetic peptide
  Seed: HIHIFSFTGEEMATK
HIHIISFTGGEMLTK

SEQ ID NO: 277374 - protein, 15 aa, Artificial Sequence
  Description of Artificial Sequence: Synthetic peptide
  Seed: HIHIFSFTGEEMATK
HIHIISFTGGEMVTK

SEQ ID NO: 277375 - protein, 15 aa, Artificial Sequence
  Description of Artificial Sequence: Synthetic peptide
  Seed: HIHIFSFTGEEMATK
HIHIISFTGNEMLTK

SEQ ID NO: 277376 - protein, 15 aa, Artificial Sequence
  Description of Artificial Sequence: Synthetic peptide
  Seed: HIHIFSFTGEEMATK
HIHIISFTGNEMVTK

SEQ ID NO: 277377 - protein, 15 aa, Artificial Sequence
  Description of Artificial Sequence: Synthetic peptide
  Seed: HIHIFSFTGEEMATK
HIHIISFTGPEMITK

SEQ ID NO: 277378 - protein, 15 aa, Artificial Sequence
  Description of Artificial Sequence: Synthetic peptide
  Seed: HIHIFSFTGEEMATK
HIHIISFTGPEMLTK

SEQ ID NO: 277379 - protein, 15 aa, Artificial Sequence
  Description of Artificial Sequence: Synthetic peptide
  Seed: HIHIFSFTGEEMATK
HIHIISFTGPEMVTK

SEQ ID NO: 277380 - protein, 15 aa, Artificial Sequence
  Description of Artificial Sequence: Synthetic peptide
  Seed: HIHIFSFTGEEMATK
HIHIISFTGSEMATK

SEQ ID NO: 277381 - protein, 15 aa, Artificial Sequence
  Description of Artificial Sequence: Synthetic peptide
  Seed: HIHIFSFTGEEMATK
HIHIISFTGSEMFTK

SEQ ID NO: 277382 - protein, 15 aa, Artificial Sequence
  Description of Artificial Sequence: Synthetic peptide
  Seed: HIHIFSFTGEEMATK
HIHIISFTGSEMITK

SEQ ID NO: 277383 - protein, 15 aa, Artificial Sequence
  Description of Artificial Sequence: Synthetic peptide
  Seed: HIHIFSFTGEEMATK
HIHIISFTGSEMLTK

SEQ ID NO: 277384 - protein, 15 aa, Artificial Sequence
  Description of Artificial Sequence: Synthetic peptide
  Seed: HIHIFSFTGEEMATK
HIHIISFTGSEMMTK

SEQ ID NO: 277385 - protein, 15 aa, Artificial Sequence
  Description of Artificial Sequence: Synthetic peptide
  Seed: HIHIFSFTGEEMATK
HIHIISFTGSEMVTK

SEQ ID NO: 277386 - protein, 15 aa, Artificial Sequence
  Description of Artificial Sequence: Synthetic peptide
  Seed: HIHIFSFTGEEMATK
HIHIISFTGTEMITK

SEQ ID NO: 277387 - protein, 15 aa, Artificial Sequence
  Description of Artificial Sequence: Synthetic peptide
  Seed: HIHIFSFTGEEMATK
HIHIISFTGTEMLTK

SEQ ID NO: 277388 - protein, 15 aa, Artificial Sequence
  Description of Artificial Sequence: Synthetic peptide
  Seed: HIHIFSFTGEEMATK
HIHIISFTGTEMVTK

SEQ ID NO: 277389 - protein, 15 aa, Artificial Sequence
  Description of Artificial Sequence: Synthetic peptide
  Seed: HIHIFSFTGEEMATK
HIHIISFVGAEMITK

SEQ ID NO: 277390 - protein, 15 aa, Artificial Sequence
  Description of Artificial Sequence: Synthetic peptide
  Seed: HIHIFSFTGEEMATK
HIHIISFVGAEMLTK

SEQ ID NO: 277391 - protein, 15 aa, Artificial Sequence
  Description of Artificial Sequence: Synthetic peptide
  Seed: HIHIFSFTGEEMATK
HIHIISFVGAEMVTK

SEQ ID NO: 277392 - protein, 15 aa, Artificial Sequence
  Description of Artificial Sequence: Synthetic peptide
  Seed: HIHIFSFTGEEMATK
HIHIISFVGSEMITK

SEQ ID NO: 277393 - protein, 15 aa, Artificial Sequence
  Description of Artificial Sequence: Synthetic peptide
  Seed: HIHIFSFTGEEMATK
HIHIISFVGSEMLTK

SEQ ID NO: 277394 - protein, 15 aa, Artificial Sequence
  Description of Artificial Sequence: Synthetic peptide
  Seed: HIHIFSFTGEEMATK
HIHIISFVGSEMVTK

SEQ ID NO: 277395 - protein, 15 aa, Artificial Sequence
  Description of Artificial Sequence: Synthetic peptide
  Seed: HIHIFSFTGEEMATK
HIHILSFAGAEMITK

SEQ ID NO: 277396 - protein, 15 aa, Artificial Sequence
  Description of Artificial Sequence: Synthetic peptide
  Seed: HIHIFSFTGEEMATK
HIHILSFAGAEMLTK

SEQ ID NO: 277397 - protein, 15 aa, Artificial Sequence
  Description of Artificial Sequence: Synthetic peptide
  Seed: HIHIFSFTGEEMATK
HIHILSFAGAEMVTK

SEQ ID NO: 277398 - protein, 15 aa, Artificial Sequence
  Description of Artificial Sequence: Synthetic peptide
  Seed: HIHIFSFTGEEMATK
HIHILSFAGSEMITK

SEQ ID NO: 277399 - protein, 15 aa, Artificial Sequence
  Description of Artificial Sequence: Synthetic peptide
  Seed: HIHIFSFTGEEMATK
HIHILSFAGSEMLTK

SEQ ID NO: 277400 - protein, 15 aa, Artificial Sequence
  Description of Artificial Sequence: Synthetic peptide
  Seed: HIHIFSFTGEEMATK
HIHILSFAGSEMVTK

SEQ ID NO: 277401 - protein, 15 aa, Artificial Sequence
  Description of Artificial Sequence: Synthetic peptide
  Seed: HIHIFSFTGEEMATK
HIHILSFIGAEMITK

SEQ ID NO: 277402 - protein, 15 aa, Artificial Sequence
  Description of Artificial Sequence: Synthetic peptide
  Seed: HIHIFSFTGEEMATK
HIHILSFIGSEMITK

SEQ ID NO: 277403 - protein, 15 aa, Artificial Sequence
  Description of Artificial Sequence: Synthetic peptide
  Seed: HIHIFSFTGEEMATK
HIHILSFSGAEMITK

SEQ ID NO: 277404 - protein, 15 aa, Artificial Sequence
  Description of Artificial Sequence: Synthetic peptide
  Seed: HIHIFSFTGEEMATK
HIHILSFSGAEMLTK

SEQ ID NO: 277405 - protein, 15 aa, Artificial Sequence
  Description of Artificial Sequence: Synthetic peptide
  Seed: HIHIFSFTGEEMATK
HIHILSFSGAEMMTK

SEQ ID NO: 277406 - protein, 15 aa, Artificial Sequence
  Description of Artificial Sequence: Synthetic peptide
  Seed: HIHIFSFTGEEMATK
HIHILSFSGAEMVTK

SEQ ID NO: 277407 - protein, 15 aa, Artificial Sequence
  Description of Artificial Sequence: Synthetic peptide
  Seed: HIHIFSFTGEEMATK
HIHILSFSGGEMITK

SEQ ID NO: 277408 - protein, 15 aa, Artificial Sequence
  Description of Artificial Sequence: Synthetic peptide
  Seed: HIHIFSFTGEEMATK
HIHILSFSGSEMITK

SEQ ID NO: 277409 - protein, 15 aa, Artificial Sequence
  Description of Artificial Sequence: Synthetic peptide
  Seed: HIHIFSFTGEEMATK
HIHILSFSGSEMLTK

SEQ ID NO: 277410 - protein, 15 aa, Artificial Sequence
  Description of Artificial Sequence: Synthetic peptide
  Seed: HIHIFSFTGEEMATK
HIHILSFSGSEMVTK

SEQ ID NO: 277411 - protein, 15 aa, Artificial Sequence
  Description of Artificial Sequence: Synthetic peptide
  Seed: HIHIFSFTGEEMATK
HIHILSFTGAEMFTK

SEQ ID NO: 277412 - protein, 15 aa, Artificial Sequence
  Description of Artificial Sequence: Synthetic peptide
  Seed: HIHIFSFTGEEMATK
HIHILSFTGAEMITK

SEQ ID NO: 277413 - protein, 15 aa, Artificial Sequence
  Description of Artificial Sequence: Synthetic peptide
  Seed: HIHIFSFTGEEMATK
HIHILSFTGAEMLTK

SEQ ID NO: 277414 - protein, 15 aa, Artificial Sequence
  Description of Artificial Sequence: Synthetic peptide
  Seed: HIHIFSFTGEEMATK
HIHILSFTGAEMMTK

SEQ ID NO: 277415 - protein, 15 aa, Artificial Sequence
  Description of Artificial Sequence: Synthetic peptide
  Seed: HIHIFSFTGEEMATK
HIHILSFTGAEMVTK

SEQ ID NO: 277416 - protein, 15 aa, Artificial Sequence
  Description of Artificial Sequence: Synthetic peptide
  Seed: HIHIFSFTGEEMATK
HIHILSFTGGEMITK

SEQ ID NO: 277417 - protein, 15 aa, Artificial Sequence
  Description of Artificial Sequence: Synthetic peptide
  Seed: HIHIFSFTGEEMATK
HIHILSFTGGEMLTK

SEQ ID NO: 277418 - protein, 15 aa, Artificial Sequence
  Description of Artificial Sequence: Synthetic peptide
  Seed: HIHIFSFTGEEMATK
HIHILSFTGGEMVTK

SEQ ID NO: 277419 - protein, 15 aa, Artificial Sequence
  Description of Artificial Sequence: Synthetic peptide
  Seed: HIHIFSFTGEEMATK
HIHILSFTGNEMITK

SEQ ID NO: 277420 - protein, 15 aa, Artificial Sequence
  Description of Artificial Sequence: Synthetic peptide
  Seed: HIHIFSFTGEEMATK
HIHILSFTGPEMITK

SEQ ID NO: 277421 - protein, 15 aa, Artificial Sequence
  Description of Artificial Sequence: Synthetic peptide
  Seed: HIHIFSFTGEEMATK
HIHILSFTGSEMITK

SEQ ID NO: 277422 - protein, 15 aa, Artificial Sequence
  Description of Artificial Sequence: Synthetic peptide
  Seed: HIHIFSFTGEEMATK
HIHILSFTGSEMLTK

SEQ ID NO: 277423 - protein, 15 aa, Artificial Sequence
  Description of Artificial Sequence: Synthetic peptide
  Seed: HIHIFSFTGEEMATK
HIHILSFTGSEMMTK

SEQ ID NO: 277424 - protein, 15 aa, Artificial Sequence
  Description of Artificial Sequence: Synthetic peptide
  Seed: HIHIFSFTGEEMATK
HIHILSFTGSEMVTK

SEQ ID NO: 277425 - protein, 15 aa, Artificial Sequence
  Description of Artificial Sequence: Synthetic peptide
  Seed: HIHIFSFTGEEMATK
HIHILSFTGTEMITK

SEQ ID NO: 277426 - protein, 15 aa, Artificial Sequence
  Description of Artificial Sequence: Synthetic peptide
  Seed: HIHIFSFTGEEMATK
HIHILSFTGTEMLTK

SEQ ID NO: 277427 - protein, 15 aa, Artificial Sequence
  Description of Artificial Sequence: Synthetic peptide
  Seed: HIHIFSFTGEEMATK
HIHILSFTGTEMVTK

SEQ ID NO: 277428 - protein, 15 aa, Artificial Sequence
  Description of Artificial Sequence: Synthetic peptide
  Seed: HIHIFSFTGEEMATK
HIHILSFVGAEMITK

SEQ ID NO: 277429 - protein, 15 aa, Artificial Sequence
  Description of Artificial Sequence: Synthetic peptide
  Seed: HIHIFSFTGEEMATK
HIHILSFVGAEMLTK

SEQ ID NO: 277430 - protein, 15 aa, Artificial Sequence
  Description of Artificial Sequence: Synthetic peptide
  Seed: HIHIFSFTGEEMATK
HIHILSFVGAEMVTK

SEQ ID NO: 277431 - protein, 15 aa, Artificial Sequence
  Description of Artificial Sequence: Synthetic peptide
  Seed: HIHIFSFTGEEMATK
HIHILSFVGSEMITK

SEQ ID NO: 277432 - protein, 15 aa, Artificial Sequence
  Description of Artificial Sequence: Synthetic peptide
  Seed: HIHIFSFTGEEMATK
HIHILSFVGSEMLTK

SEQ ID NO: 277433 - protein, 15 aa, Artificial Sequence
  Description of Artificial Sequence: Synthetic peptide
  Seed: HIHIFSFTGEEMATK
HIHILSFVGSEMVTK

SEQ ID NO: 277434 - protein, 15 aa, Artificial Sequence
  Description of Artificial Sequence: Synthetic peptide
  Seed: HIHIFSFTGEEMATK
HIHIMSFAGAEMITK

SEQ ID NO: 277435 - protein, 15 aa, Artificial Sequence
  Description of Artificial Sequence: Synthetic peptide
  Seed: HIHIFSFTGEEMATK
HIHIMSFAGSEMITK

SEQ ID NO: 277436 - protein, 15 aa, Artificial Sequence
  Description of Artificial Sequence: Synthetic peptide
  Seed: HIHIFSFTGEEMATK
HIHIMSFSGAEMITK

SEQ ID NO: 277437 - protein, 15 aa, Artificial Sequence
  Description of Artificial Sequence: Synthetic peptide
  Seed: HIHIFSFTGEEMATK
HIHIMSFSGAEMLTK

SEQ ID NO: 277438 - protein, 15 aa, Artificial Sequence
  Description of Artificial Sequence: Synthetic peptide
  Seed: HIHIFSFTGEEMATK
HIHIMSFSGAEMVTK

SEQ ID NO: 277439 - protein, 15 aa, Artificial Sequence
  Description of Artificial Sequence: Synthetic peptide
  Seed: HIHIFSFTGEEMATK
HIHIMSFSGSEMITK

SEQ ID NO: 277440 - protein, 15 aa, Artificial Sequence
  Description of Artificial Sequence: Synthetic peptide
  Seed: HIHIFSFTGEEMATK
HIHIMSFSGSEMLTK

SEQ ID NO: 277441 - protein, 15 aa, Artificial Sequence
  Description of Artificial Sequence: Synthetic peptide
  Seed: HIHIFSFTGEEMATK
HIHIMSFSGSEMVTK

SEQ ID NO: 277442 - protein, 15 aa, Artificial Sequence
  Description of Artificial Sequence: Synthetic peptide
  Seed: HIHIFSFTGEEMATK
HIHIMSFTGAEMITK

SEQ ID NO: 277443 - protein, 15 aa, Artificial Sequence
  Description of Artificial Sequence: Synthetic peptide
  Seed: HIHIFSFTGEEMATK
HIHIMSFTGAEMLTK

SEQ ID NO: 277444 - protein, 15 aa, Artificial Sequence
  Description of Artificial Sequence: Synthetic peptide
  Seed: HIHIFSFTGEEMATK
HIHIMSFTGAEMVTK

SEQ ID NO: 277445 - protein, 15 aa, Artificial Sequence
  Description of Artificial Sequence: Synthetic peptide
  Seed: HIHIFSFTGEEMATK
HIHIMSFTGGEMITK

SEQ ID NO: 277446 - protein, 15 aa, Artificial Sequence
  Description of Artificial Sequence: Synthetic peptide
  Seed: HIHIFSFTGEEMATK
HIHIMSFTGSEMITK

SEQ ID NO: 277447 - protein, 15 aa, Artificial Sequence
  Description of Artificial Sequence: Synthetic peptide
  Seed: HIHIFSFTGEEMATK
HIHIMSFTGSEMLTK

SEQ ID NO: 277448 - protein, 15 aa, Artificial Sequence
  Description of Artificial Sequence: Synthetic peptide
  Seed: HIHIFSFTGEEMATK
HIHIMSFTGSEMVTK

SEQ ID NO: 277449 - protein, 15 aa, Artificial Sequence
  Description of Artificial Sequence: Synthetic peptide
  Seed: HIHIFSFTGEEMATK
HIHIMSFVGAEMITK

SEQ ID NO: 277450 - protein, 15 aa, Artificial Sequence
  Description of Artificial Sequence: Synthetic peptide
  Seed: HIHIFSFTGEEMATK
HIHIMSFVGSEMITK

SEQ ID NO: 277451 - protein, 15 aa, Artificial Sequence
  Description of Artificial Sequence: Synthetic peptide
  Seed: HIHIFSFTGEEMATK
HIHIMSFVGSEMVTK

SEQ ID NO: 277452 - protein, 15 aa, Artificial Sequence
  Description of Artificial Sequence: Synthetic peptide
  Seed: HIHIFSFTGEEMATK
HIHIVSFAGSEMITK

SEQ ID NO: 277453 - protein, 15 aa, Artificial Sequence
  Description of Artificial Sequence: Synthetic peptide
  Seed: HIHIFSFTGEEMATK
HIHIVSFSGAEMITK

SEQ ID NO: 277454 - protein, 15 aa, Artificial Sequence
  Description of Artificial Sequence: Synthetic peptide
  Seed: HIHIFSFTGEEMATK
HIHIVSFSGAEMLTK

SEQ ID NO: 277455 - protein, 15 aa, Artificial Sequence
  Description of Artificial Sequence: Synthetic peptide
  Seed: HIHIFSFTGEEMATK
HIHIVSFSGAEMVTK

SEQ ID NO: 277456 - protein, 15 aa, Artificial Sequence
  Description of Artificial Sequence: Synthetic peptide
  Seed: HIHIFSFTGEEMATK
HIHIVSFSGSEMITK

SEQ ID NO: 277457 - protein, 15 aa, Artificial Sequence
  Description of Artificial Sequence: Synthetic peptide
  Seed: HIHIFSFTGEEMATK
HIHIVSFSGSEMLTK

SEQ ID NO: 277458 - protein, 15 aa, Artificial Sequence
  Description of Artificial Sequence: Synthetic peptide
  Seed: HIHIFSFTGEEMATK
HIHIVSFSGSEMVTK

SEQ ID NO: 277459 - protein, 15 aa, Artificial Sequence
  Description of Artificial Sequence: Synthetic peptide
  Seed: HIHIFSFTGEEMATK
HIHIVSFTGAEMITK

SEQ ID NO: 277460 - protein, 15 aa, Artificial Sequence
  Description of Artificial Sequence: Synthetic peptide
  Seed: HIHIFSFTGEEMATK
HIHIVSFTGAEMLTK

SEQ ID NO: 277461 - protein, 15 aa, Artificial Sequence
  Description of Artificial Sequence: Synthetic peptide
  Seed: HIHIFSFTGEEMATK
HIHIVSFTGAEMVTK

SEQ ID NO: 277462 - protein, 15 aa, Artificial Sequence
  Description of Artificial Sequence: Synthetic peptide
  Seed: HIHIFSFTGEEMATK
HIHIVSFTGGEMITK

SEQ ID NO: 277463 - protein, 15 aa, Artificial Sequence
  Description of Artificial Sequence: Synthetic peptide
  Seed: HIHIFSFTGEEMATK
HIHIVSFTGSEMITK

SEQ ID NO: 277464 - protein, 15 aa, Artificial Sequence
  Description of Artificial Sequence: Synthetic peptide
  Seed: HIHIFSFTGEEMATK
HIHIVSFTGSEMLTK

SEQ ID NO: 277465 - protein, 15 aa, Artificial Sequence
  Description of Artificial Sequence: Synthetic peptide
  Seed: HIHIFSFTGEEMATK
HIHIVSFTGSEMVTK

SEQ ID NO: 277466 - protein, 15 aa, Artificial Sequence
  Description of Artificial Sequence: Synthetic peptide
  Seed: HIHIFSFTGEEMATK
HIHIVSFVGSEMITK

SEQ ID NO: 277467 - protein, 15 aa, Artificial Sequence
  Description of Artificial Sequence: Synthetic peptide
  Seed: HIHIFSFTGEEMATK
HIHIWSFAGAEMITK

SEQ ID NO: 277468 - protein, 15 aa, Artificial Sequence
  Description of Artificial Sequence: Synthetic peptide
  Seed: HIHIFSFTGEEMATK
HIHIWSFAGAEMLTK

SEQ ID NO: 277469 - protein, 15 aa, Artificial Sequence
  Description of Artificial Sequence: Synthetic peptide
  Seed: HIHIFSFTGEEMATK
HIHIWSFAGAEMMTK

SEQ ID NO: 277470 - protein, 15 aa, Artificial Sequence
  Description of Artificial Sequence: Synthetic peptide
  Seed: HIHIFSFTGEEMATK
HIHIWSFAGAEMVTK

SEQ ID NO: 277471 - protein, 15 aa, Artificial Sequence
  Description of Artificial Sequence: Synthetic peptide
  Seed: HIHIFSFTGEEMATK
HIHIWSFAGGEMITK

SEQ ID NO: 277472 - protein, 15 aa, Artificial Sequence
  Description of Artificial Sequence: Synthetic peptide
  Seed: HIHIFSFTGEEMATK
HIHIWSFAGSEMITK

SEQ ID NO: 277473 - protein, 15 aa, Artificial Sequence
  Description of Artificial Sequence: Synthetic peptide
  Seed: HIHIFSFTGEEMATK
HIHIWSFAGSEMLTK

SEQ ID NO: 277474 - protein, 15 aa, Artificial Sequence
  Description of Artificial Sequence: Synthetic peptide
  Seed: HIHIFSFTGEEMATK
HIHIWSFAGSEMVTK

SEQ ID NO: 277475 - protein, 15 aa, Artificial Sequence
  Description of Artificial Sequence: Synthetic peptide
  Seed: HIHIFSFTGEEMATK
HIHIWSFHGAEMITK

SEQ ID NO: 277476 - protein, 15 aa, Artificial Sequence
  Description of Artificial Sequence: Synthetic peptide
  Seed: HIHIFSFTGEEMATK
HIHIWSFIGAEMITK

SEQ ID NO: 277477 - protein, 15 aa, Artificial Sequence
  Description of Artificial Sequence: Synthetic peptide
  Seed: HIHIFSFTGEEMATK
HIHIWSFIGSEMITK

SEQ ID NO: 277478 - protein, 15 aa, Artificial Sequence
  Description of Artificial Sequence: Synthetic peptide
  Seed: HIHIFSFTGEEMATK
HIHIWSFIGSEMVTK

SEQ ID NO: 277479 - protein, 15 aa, Artificial Sequence
  Description of Artificial Sequence: Synthetic peptide
  Seed: HIHIFSFTGEEMATK
HIHIWSFSGAEMITK

SEQ ID NO: 277480 - protein, 15 aa, Artificial Sequence
  Description of Artificial Sequence: Synthetic peptide
  Seed: HIHIFSFTGEEMATK
HIHIWSFSGAEMLTK

SEQ ID NO: 277481 - protein, 15 aa, Artificial Sequence
  Description of Artificial Sequence: Synthetic peptide
  Seed: HIHIFSFTGEEMATK
HIHIWSFSGAEMMTK

SEQ ID NO: 277482 - protein, 15 aa, Artificial Sequence
  Description of Artificial Sequence: Synthetic peptide
  Seed: HIHIFSFTGEEMATK
HIHIWSFSGAEMVTK

SEQ ID NO: 277483 - protein, 15 aa, Artificial Sequence
  Description of Artificial Sequence: Synthetic peptide
  Seed: HIHIFSFTGEEMATK
HIHIWSFSGGEMITK

SEQ ID NO: 277484 - protein, 15 aa, Artificial Sequence
  Description of Artificial Sequence: Synthetic peptide
  Seed: HIHIFSFTGEEMATK
HIHIWSFSGSEMITK

SEQ ID NO: 277485 - protein, 15 aa, Artificial Sequence
  Description of Artificial Sequence: Synthetic peptide
  Seed: HIHIFSFTGEEMATK
HIHIWSFSGSEMLTK

SEQ ID NO: 277486 - protein, 15 aa, Artificial Sequence
  Description of Artificial Sequence: Synthetic peptide
  Seed: HIHIFSFTGEEMATK
HIHIWSFSGSEMVTK

SEQ ID NO: 277487 - protein, 15 aa, Artificial Sequence
  Description of Artificial Sequence: Synthetic peptide
  Seed: HIHIFSFTGEEMATK
HIHIWSFSGTEMITK

SEQ ID NO: 277488 - protein, 15 aa, Artificial Sequence
  Description of Artificial Sequence: Synthetic peptide
  Seed: HIHIFSFTGEEMATK
HIHIWSFTGAEMFTK

SEQ ID NO: 277489 - protein, 15 aa, Artificial Sequence
  Description of Artificial Sequence: Synthetic peptide
  Seed: HIHIFSFTGEEMATK
HIHIWSFTGAEMITK

SEQ ID NO: 277490 - protein, 15 aa, Artificial Sequence
  Description of Artificial Sequence: Synthetic peptide
  Seed: HIHIFSFTGEEMATK
HIHIWSFTGAEMLTK

SEQ ID NO: 277491 - protein, 15 aa, Artificial Sequence
  Description of Artificial Sequence: Synthetic peptide
  Seed: HIHIFSFTGEEMATK
HIHIWSFTGAEMMTK

SEQ ID NO: 277492 - protein, 15 aa, Artificial Sequence
  Description of Artificial Sequence: Synthetic peptide
  Seed: HIHIFSFTGEEMATK
HIHIWSFTGAEMVTK

SEQ ID NO: 277493 - protein, 15 aa, Artificial Sequence
  Description of Artificial Sequence: Synthetic peptide
  Seed: HIHIFSFTGEEMATK
HIHIWSFTGGEMITK

SEQ ID NO: 277494 - protein, 15 aa, Artificial Sequence
  Description of Artificial Sequence: Synthetic peptide
  Seed: HIHIFSFTGEEMATK
HIHIWSFTGGEMLTK

SEQ ID NO: 277495 - protein, 15 aa, Artificial Sequence
  Description of Artificial Sequence: Synthetic peptide
  Seed: HIHIFSFTGEEMATK
HIHIWSFTGGEMVTK

SEQ ID NO: 277496 - protein, 15 aa, Artificial Sequence
  Description of Artificial Sequence: Synthetic peptide
  Seed: HIHIFSFTGEEMATK
HIHIWSFTGNEMITK

SEQ ID NO: 277497 - protein, 15 aa, Artificial Sequence
  Description of Artificial Sequence: Synthetic peptide
  Seed: HIHIFSFTGEEMATK
HIHIWSFTGPEMITK

SEQ ID NO: 277498 - protein, 15 aa, Artificial Sequence
  Description of Artificial Sequence: Synthetic peptide
  Seed: HIHIFSFTGEEMATK
HIHIWSFTGSEMFTK

SEQ ID NO: 277499 - protein, 15 aa, Artificial Sequence
  Description of Artificial Sequence: Synthetic peptide
  Seed: HIHIFSFTGEEMATK
HIHIWSFTGSEMITK

SEQ ID NO: 277500 - protein, 15 aa, Artificial Sequence
  Description of Artificial Sequence: Synthetic peptide
  Seed: HIHIFSFTGEEMATK
HIHIWSFTGSEMLTK

SEQ ID NO: 277501 - protein, 15 aa, Artificial Sequence
  Description of Artificial Sequence: Synthetic peptide
  Seed: HIHIFSFTGEEMATK
HIHIWSFTGSEMMTK

SEQ ID NO: 277502 - protein, 15 aa, Artificial Sequence
  Description of Artificial Sequence: Synthetic peptide
  Seed: HIHIFSFTGEEMATK
HIHIWSFTGSEMVTK

SEQ ID NO: 277503 - protein, 15 aa, Artificial Sequence
  Description of Artificial Sequence: Synthetic peptide
  Seed: HIHIFSFTGEEMATK
HIHIWSFTGTEMITK

SEQ ID NO: 277504 - protein, 15 aa, Artificial Sequence
  Description of Artificial Sequence: Synthetic peptide
  Seed: HIHIFSFTGEEMATK
HIHIWSFTGTEMLTK

SEQ ID NO: 277505 - protein, 15 aa, Artificial Sequence
  Description of Artificial Sequence: Synthetic peptide
  Seed: HIHIFSFTGEEMATK
HIHIWSFTGTEMVTK

SEQ ID NO: 277506 - protein, 15 aa, Artificial Sequence
  Description of Artificial Sequence: Synthetic peptide
  Seed: HIHIFSFTGEEMATK
HIHIWSFVGAEMITK

SEQ ID NO: 277507 - protein, 15 aa, Artificial Sequence
  Description of Artificial Sequence: Synthetic peptide
  Seed: HIHIFSFTGEEMATK
HIHIWSFVGAEMLTK

SEQ ID NO: 277508 - protein, 15 aa, Artificial Sequence
  Description of Artificial Sequence: Synthetic peptide
  Seed: HIHIFSFTGEEMATK
HIHIWSFVGAEMVTK

SEQ ID NO: 277509 - protein, 15 aa, Artificial Sequence
  Description of Artificial Sequence: Synthetic peptide
  Seed: HIHIFSFTGEEMATK
HIHIWSFVGSEMITK

SEQ ID NO: 277510 - protein, 15 aa, Artificial Sequence
  Description of Artificial Sequence: Synthetic peptide
  Seed: HIHIFSFTGEEMATK
HIHIWSFVGSEMLTK

SEQ ID NO: 277511 - protein, 15 aa, Artificial Sequence
  Description of Artificial Sequence: Synthetic peptide
  Seed: HIHIFSFTGEEMATK
HIHIWSFVGSEMVTK

SEQ ID NO: 277512 - protein, 15 aa, Artificial Sequence
  Description of Artificial Sequence: Synthetic peptide
  Seed: HIHIFSFTGEEMATK
HIHIYSFAGAEMATK

SEQ ID NO: 277513 - protein, 15 aa, Artificial Sequence
  Description of Artificial Sequence: Synthetic peptide
  Seed: HIHIFSFTGEEMATK
HIHIYSFAGAEMFTK

SEQ ID NO: 277514 - protein, 15 aa, Artificial Sequence
  Description of Artificial Sequence: Synthetic peptide
  Seed: HIHIFSFTGEEMATK
HIHIYSFAGAEMITK

SEQ ID NO: 277515 - protein, 15 aa, Artificial Sequence
  Description of Artificial Sequence: Synthetic peptide
  Seed: HIHIFSFTGEEMATK
HIHIYSFAGAEMLTK

SEQ ID NO: 277516 - protein, 15 aa, Artificial Sequence
  Description of Artificial Sequence: Synthetic peptide
  Seed: HIHIFSFTGEEMATK
HIHIYSFAGAEMMTK

SEQ ID NO: 277517 - protein, 15 aa, Artificial Sequence
  Description of Artificial Sequence: Synthetic peptide
  Seed: HIHIFSFTGEEMATK
HIHIYSFAGAEMVTK

SEQ ID NO: 277518 - protein, 15 aa, Artificial Sequence
  Description of Artificial Sequence: Synthetic peptide
  Seed: HIHIFSFTGEEMATK
HIHIYSFAGGEMITK

SEQ ID NO: 277519 - protein, 15 aa, Artificial Sequence
  Description of Artificial Sequence: Synthetic peptide
  Seed: HIHIFSFTGEEMATK
HIHIYSFAGGEMLTK

SEQ ID NO: 277520 - protein, 15 aa, Artificial Sequence
  Description of Artificial Sequence: Synthetic peptide
  Seed: HIHIFSFTGEEMATK
HIHIYSFAGGEMVTK

SEQ ID NO: 277521 - protein, 15 aa, Artificial Sequence
  Description of Artificial Sequence: Synthetic peptide
  Seed: HIHIFSFTGEEMATK
HIHIYSFAGNEMITK

SEQ ID NO: 277522 - protein, 15 aa, Artificial Sequence
  Description of Artificial Sequence: Synthetic peptide
  Seed: HIHIFSFTGEEMATK
HIHIYSFAGPEMITK

SEQ ID NO: 277523 - protein, 15 aa, Artificial Sequence
  Description of Artificial Sequence: Synthetic peptide
  Seed: HIHIFSFTGEEMATK
HIHIYSFAGPEMLTK

SEQ ID NO: 277524 - protein, 15 aa, Artificial Sequence
  Description of Artificial Sequence: Synthetic peptide
  Seed: HIHIFSFTGEEMATK
HIHIYSFAGPEMVTK

SEQ ID NO: 277525 - protein, 15 aa, Artificial Sequence
  Description of Artificial Sequence: Synthetic peptide
  Seed: HIHIFSFTGEEMATK
HIHIYSFAGSEMITK

SEQ ID NO: 277526 - protein, 15 aa, Artificial Sequence
  Description of Artificial Sequence: Synthetic peptide
  Seed: HIHIFSFTGEEMATK
HIHIYSFAGSEMLTK

SEQ ID NO: 277527 - protein, 15 aa, Artificial Sequence
  Description of Artificial Sequence: Synthetic peptide
  Seed: HIHIFSFTGEEMATK
HIHIYSFAGSEMMTK

SEQ ID NO: 277528 - protein, 15 aa, Artificial Sequence
  Description of Artificial Sequence: Synthetic peptide
  Seed: HIHIFSFTGEEMATK
HIHIYSFAGSEMVTK

SEQ ID NO: 277529 - protein, 15 aa, Artificial Sequence
  Description of Artificial Sequence: Synthetic peptide
  Seed: HIHIFSFTGEEMATK
HIHIYSFAGTEMITK

SEQ ID NO: 277530 - protein, 15 aa, Artificial Sequence
  Description of Artificial Sequence: Synthetic peptide
  Seed: HIHIFSFTGEEMATK
HIHIYSFAGTEMLTK

SEQ ID NO: 277531 - protein, 15 aa, Artificial Sequence
  Description of Artificial Sequence: Synthetic peptide
  Seed: HIHIFSFTGEEMATK
HIHIYSFAGTEMVTK

SEQ ID NO: 277532 - protein, 15 aa, Artificial Sequence
  Description of Artificial Sequence: Synthetic peptide
  Seed: HIHIFSFTGEEMATK
HIHIYSFHGAEMITK

SEQ ID NO: 277533 - protein, 15 aa, Artificial Sequence
  Description of Artificial Sequence: Synthetic peptide
  Seed: HIHIFSFTGEEMATK
HIHIYSFHGAEMLTK

SEQ ID NO: 277534 - protein, 15 aa, Artificial Sequence
  Description of Artificial Sequence: Synthetic peptide
  Seed: HIHIFSFTGEEMATK
HIHIYSFHGAEMVTK

SEQ ID NO: 277535 - protein, 15 aa, Artificial Sequence
  Description of Artificial Sequence: Synthetic peptide
  Seed: HIHIFSFTGEEMATK
HIHIYSFHGSEMITK

SEQ ID NO: 277536 - protein, 15 aa, Artificial Sequence
  Description of Artificial Sequence: Synthetic peptide
  Seed: HIHIFSFTGEEMATK
HIHIYSFHGSEMLTK

SEQ ID NO: 277537 - protein, 15 aa, Artificial Sequence
  Description of Artificial Sequence: Synthetic peptide
  Seed: HIHIFSFTGEEMATK
HIHIYSFHGSEMVTK

SEQ ID NO: 277538 - protein, 15 aa, Artificial Sequence
  Description of Artificial Sequence: Synthetic peptide
  Seed: HIHIFSFTGEEMATK
HIHIYSFIGAEMITK

SEQ ID NO: 277539 - protein, 15 aa, Artificial Sequence
  Description of Artificial Sequence: Synthetic peptide
  Seed: HIHIFSFTGEEMATK
HIHIYSFIGAEMLTK

SEQ ID NO: 277540 - protein, 15 aa, Artificial Sequence
  Description of Artificial Sequence: Synthetic peptide
  Seed: HIHIFSFTGEEMATK
HIHIYSFIGAEMVTK

SEQ ID NO: 277541 - protein, 15 aa, Artificial Sequence
  Description of Artificial Sequence: Synthetic peptide
  Seed: HIHIFSFTGEEMATK
HIHIYSFIGGEMITK

SEQ ID NO: 277542 - protein, 15 aa, Artificial Sequence
  Description of Artificial Sequence: Synthetic peptide
  Seed: HIHIFSFTGEEMATK
HIHIYSFIGPEMITK

SEQ ID NO: 277543 - protein, 15 aa, Artificial Sequence
  Description of Artificial Sequence: Synthetic peptide
  Seed: HIHIFSFTGEEMATK
HIHIYSFIGSEMITK

SEQ ID NO: 277544 - protein, 15 aa, Artificial Sequence
  Description of Artificial Sequence: Synthetic peptide
  Seed: HIHIFSFTGEEMATK
HIHIYSFIGSEMLTK

SEQ ID NO: 277545 - protein, 15 aa, Artificial Sequence
  Description of Artificial Sequence: Synthetic peptide
  Seed: HIHIFSFTGEEMATK
HIHIYSFIGSEMVTK

SEQ ID NO: 277546 - protein, 15 aa, Artificial Sequence
  Description of Artificial Sequence: Synthetic peptide
  Seed: HIHIFSFTGEEMATK
HIHIYSFIGTEMITK

SEQ ID NO: 277547 - protein, 15 aa, Artificial Sequence
  Description of Artificial Sequence: Synthetic peptide
  Seed: HIHIFSFTGEEMATK
HIHIYSFSGAEMFTK

SEQ ID NO: 277548 - protein, 15 aa, Artificial Sequence
  Description of Artificial Sequence: Synthetic peptide
  Seed: HIHIFSFTGEEMATK
HIHIYSFSGAEMITK

SEQ ID NO: 277549 - protein, 15 aa, Artificial Sequence
  Description of Artificial Sequence: Synthetic peptide
  Seed: HIHIFSFTGEEMATK
HIHIYSFSGAEMLTK

SEQ ID NO: 277550 - protein, 15 aa, Artificial Sequence
  Description of Artificial Sequence: Synthetic peptide
  Seed: HIHIFSFTGEEMATK
HIHIYSFSGAEMMTK

SEQ ID NO: 277551 - protein, 15 aa, Artificial Sequence
  Description of Artificial Sequence: Synthetic peptide
  Seed: HIHIFSFTGEEMATK
HIHIYSFSGAEMVTK

SEQ ID NO: 277552 - protein, 15 aa, Artificial Sequence
  Description of Artificial Sequence: Synthetic peptide
  Seed: HIHIFSFTGEEMATK
HIHIYSFSGGEMITK

SEQ ID NO: 277553 - protein, 15 aa, Artificial Sequence
  Description of Artificial Sequence: Synthetic peptide
  Seed: HIHIFSFTGEEMATK
HIHIYSFSGGEMLTK

SEQ ID NO: 277554 - protein, 15 aa, Artificial Sequence
  Description of Artificial Sequence: Synthetic peptide
  Seed: HIHIFSFTGEEMATK
HIHIYSFSGGEMVTK

SEQ ID NO: 277555 - protein, 15 aa, Artificial Sequence
  Description of Artificial Sequence: Synthetic peptide
  Seed: HIHIFSFTGEEMATK
HIHIYSFSGNEMITK

SEQ ID NO: 277556 - protein, 15 aa, Artificial Sequence
  Description of Artificial Sequence: Synthetic peptide
  Seed: HIHIFSFTGEEMATK
HIHIYSFSGNEMLTK

SEQ ID NO: 277557 - protein, 15 aa, Artificial Sequence
  Description of Artificial Sequence: Synthetic peptide
  Seed: HIHIFSFTGEEMATK
HIHIYSFSGNEMVTK

SEQ ID NO: 277558 - protein, 15 aa, Artificial Sequence
  Description of Artificial Sequence: Synthetic peptide
  Seed: HIHIFSFTGEEMATK
HIHIYSFSGPEMITK

SEQ ID NO: 277559 - protein, 15 aa, Artificial Sequence
  Description of Artificial Sequence: Synthetic peptide
  Seed: HIHIFSFTGEEMATK
HIHIYSFSGPEMLTK

SEQ ID NO: 277560 - protein, 15 aa, Artificial Sequence
  Description of Artificial Sequence: Synthetic peptide
  Seed: HIHIFSFTGEEMATK
HIHIYSFSGSEMFTK

SEQ ID NO: 277561 - protein, 15 aa, Artificial Sequence
  Description of Artificial Sequence: Synthetic peptide
  Seed: HIHIFSFTGEEMATK
HIHIYSFSGSEMITK

SEQ ID NO: 277562 - protein, 15 aa, Artificial Sequence
  Description of Artificial Sequence: Synthetic peptide
  Seed: HIHIFSFTGEEMATK
HIHIYSFSGSEMLTK

SEQ ID NO: 277563 - protein, 15 aa, Artificial Sequence
  Description of Artificial Sequence: Synthetic peptide
  Seed: HIHIFSFTGEEMATK
HIHIYSFSGSEMMTK

SEQ ID NO: 277564 - protein, 15 aa, Artificial Sequence
  Description of Artificial Sequence: Synthetic peptide
  Seed: HIHIFSFTGEEMATK
HIHIYSFSGSEMVTK

SEQ ID NO: 277565 - protein, 15 aa, Artificial Sequence
  Description of Artificial Sequence: Synthetic peptide
  Seed: HIHIFSFTGEEMATK
HIHIYSFSGTEMITK

SEQ ID NO: 277566 - protein, 15 aa, Artificial Sequence
  Description of Artificial Sequence: Synthetic peptide
  Seed: HIHIFSFTGEEMATK
HIHIYSFSGTEMLTK

SEQ ID NO: 277567 - protein, 15 aa, Artificial Sequence
  Description of Artificial Sequence: Synthetic peptide
  Seed: HIHIFSFTGEEMATK
HIHIYSFSGTEMVTK

SEQ ID NO: 277568 - protein, 15 aa, Artificial Sequence
  Description of Artificial Sequence: Synthetic peptide
  Seed: HIHIFSFTGEEMATK
HIHIYSFSGVEMITK

SEQ ID NO: 277569 - protein, 15 aa, Artificial Sequence
  Description of Artificial Sequence: Synthetic peptide
  Seed: HIHIFSFTGEEMATK
HIHIYSFSGVEMLTK

SEQ ID NO: 277570 - protein, 15 aa, Artificial Sequence
  Description of Artificial Sequence: Synthetic peptide
  Seed: HIHIFSFTGEEMATK
HIHIYSFSGVEMVTK

SEQ ID NO: 277571 - protein, 15 aa, Artificial Sequence
  Description of Artificial Sequence: Synthetic peptide
  Seed: HIHIFSFTGEEMATK
HIHIYSFTGAEMFTK

SEQ ID NO: 277572 - protein, 15 aa, Artificial Sequence
  Description of Artificial Sequence: Synthetic peptide
  Seed: HIHIFSFTGEEMATK
HIHIYSFTGAEMITK

SEQ ID NO: 277573 - protein, 15 aa, Artificial Sequence
  Description of Artificial Sequence: Synthetic peptide
  Seed: HIHIFSFTGEEMATK
HIHIYSFTGAEMLTK

SEQ ID NO: 277574 - protein, 15 aa, Artificial Sequence
  Description of Artificial Sequence: Synthetic peptide
  Seed: HIHIFSFTGEEMATK
HIHIYSFTGAEMMTK

SEQ ID NO: 277575 - protein, 15 aa, Artificial Sequence
  Description of Artificial Sequence: Synthetic peptide
  Seed: HIHIFSFTGEEMATK
HIHIYSFTGAEMVTK

SEQ ID NO: 277576 - protein, 15 aa, Artificial Sequence
  Description of Artificial Sequence: Synthetic peptide
  Seed: HIHIFSFTGEEMATK
HIHIYSFTGGEMITK

SEQ ID NO: 277577 - protein, 15 aa, Artificial Sequence
  Description of Artificial Sequence: Synthetic peptide
  Seed: HIHIFSFTGEEMATK
HIHIYSFTGGEMLTK

SEQ ID NO: 277578 - protein, 15 aa, Artificial Sequence
  Description of Artificial Sequence: Synthetic peptide
  Seed: HIHIFSFTGEEMATK
HIHIYSFTGGEMVTK

SEQ ID NO: 277579 - protein, 15 aa, Artificial Sequence
  Description of Artificial Sequence: Synthetic peptide
  Seed: HIHIFSFTGEEMATK
HIHIYSFTGIEMITK

SEQ ID NO: 277580 - protein, 15 aa, Artificial Sequence
  Description of Artificial Sequence: Synthetic peptide
  Seed: HIHIFSFTGEEMATK
HIHIYSFTGNEMITK

SEQ ID NO: 277581 - protein, 15 aa, Artificial Sequence
  Description of Artificial Sequence: Synthetic peptide
  Seed: HIHIFSFTGEEMATK
HIHIYSFTGNEMLTK

SEQ ID NO: 277582 - protein, 15 aa, Artificial Sequence
  Description of Artificial Sequence: Synthetic peptide
  Seed: HIHIFSFTGEEMATK
HIHIYSFTGNEMVTK

SEQ ID NO: 277583 - protein, 15 aa, Artificial Sequence
  Description of Artificial Sequence: Synthetic peptide
  Seed: HIHIFSFTGEEMATK
HIHIYSFTGPEMITK

SEQ ID NO: 277584 - protein, 15 aa, Artificial Sequence
  Description of Artificial Sequence: Synthetic peptide
  Seed: HIHIFSFTGEEMATK
HIHIYSFTGPEMLTK

SEQ ID NO: 277585 - protein, 15 aa, Artificial Sequence
  Description of Artificial Sequence: Synthetic peptide
  Seed: HIHIFSFTGEEMATK
HIHIYSFTGPEMVTK

SEQ ID NO: 277586 - protein, 15 aa, Artificial Sequence
  Description of Artificial Sequence: Synthetic peptide
  Seed: HIHIFSFTGEEMATK
HIHIYSFTGSEMATK

SEQ ID NO: 277587 - protein, 15 aa, Artificial Sequence
  Description of Artificial Sequence: Synthetic peptide
  Seed: HIHIFSFTGEEMATK
HIHIYSFTGSEMFTK

SEQ ID NO: 277588 - protein, 15 aa, Artificial Sequence
  Description of Artificial Sequence: Synthetic peptide
  Seed: HIHIFSFTGEEMATK
HIHIYSFTGSEMITK

SEQ ID NO: 277589 - protein, 15 aa, Artificial Sequence
  Description of Artificial Sequence: Synthetic peptide
  Seed: HIHIFSFTGEEMATK
HIHIYSFTGSEMLTK

SEQ ID NO: 277590 - protein, 15 aa, Artificial Sequence
  Description of Artificial Sequence: Synthetic peptide
  Seed: HIHIFSFTGEEMATK
HIHIYSFTGSEMMTK

SEQ ID NO: 277591 - protein, 15 aa, Artificial Sequence
  Description of Artificial Sequence: Synthetic peptide
  Seed: HIHIFSFTGEEMATK
HIHIYSFTGSEMVTK

SEQ ID NO: 277592 - protein, 15 aa, Artificial Sequence
  Description of Artificial Sequence: Synthetic peptide
  Seed: HIHIFSFTGEEMATK
HIHIYSFTGTEMITK

SEQ ID NO: 277593 - protein, 15 aa, Artificial Sequence
  Description of Artificial Sequence: Synthetic peptide
  Seed: HIHIFSFTGEEMATK
HIHIYSFTGTEMLTK

SEQ ID NO: 277594 - protein, 15 aa, Artificial Sequence
  Description of Artificial Sequence: Synthetic peptide
  Seed: HIHIFSFTGEEMATK
HIHIYSFTGTEMVTK

SEQ ID NO: 277595 - protein, 15 aa, Artificial Sequence
  Description of Artificial Sequence: Synthetic peptide
  Seed: HIHIFSFTGEEMATK
HIHIYSFTGVEMITK

SEQ ID NO: 277596 - protein, 15 aa, Artificial Sequence
  Description of Artificial Sequence: Synthetic peptide
  Seed: HIHIFSFTGEEMATK
HIHIYSFTGVEMLTK

SEQ ID NO: 277597 - protein, 15 aa, Artificial Sequence
  Description of Artificial Sequence: Synthetic peptide
  Seed: HIHIFSFTGEEMATK
HIHIYSFTGVEMVTK

SEQ ID NO: 277598 - protein, 15 aa, Artificial Sequence
  Description of Artificial Sequence: Synthetic peptide
  Seed: HIHIFSFTGEEMATK
HIHIYSFVGAEMITK

SEQ ID NO: 277599 - protein, 15 aa, Artificial Sequence
  Description of Artificial Sequence: Synthetic peptide
  Seed: HIHIFSFTGEEMATK
HIHIYSFVGAEMLTK

SEQ ID NO: 277600 - protein, 15 aa, Artificial Sequence
  Description of Artificial Sequence: Synthetic peptide
  Seed: HIHIFSFTGEEMATK
HIHIYSFVGAEMMTK

SEQ ID NO: 277601 - protein, 15 aa, Artificial Sequence
  Description of Artificial Sequence: Synthetic peptide
  Seed: HIHIFSFTGEEMATK
HIHIYSFVGAEMVTK

SEQ ID NO: 277602 - protein, 15 aa, Artificial Sequence
  Description of Artificial Sequence: Synthetic peptide
  Seed: HIHIFSFTGEEMATK
HIHIYSFVGGEMITK

SEQ ID NO: 277603 - protein, 15 aa, Artificial Sequence
  Description of Artificial Sequence: Synthetic peptide
  Seed: HIHIFSFTGEEMATK
HIHIYSFVGGEMLTK

SEQ ID NO: 277604 - protein, 15 aa, Artificial Sequence
  Description of Artificial Sequence: Synthetic peptide
  Seed: HIHIFSFTGEEMATK
HIHIYSFVGGEMVTK

SEQ ID NO: 277605 - protein, 15 aa, Artificial Sequence
  Description of Artificial Sequence: Synthetic peptide
  Seed: HIHIFSFTGEEMATK
HIHIYSFVGNEMITK

SEQ ID NO: 277606 - protein, 15 aa, Artificial Sequence
  Description of Artificial Sequence: Synthetic peptide
  Seed: HIHIFSFTGEEMATK
HIHIYSFVGPEMITK

SEQ ID NO: 277607 - protein, 15 aa, Artificial Sequence
  Description of Artificial Sequence: Synthetic peptide
  Seed: HIHIFSFTGEEMATK
HIHIYSFVGPEMLTK

SEQ ID NO: 277608 - protein, 15 aa, Artificial Sequence
  Description of Artificial Sequence: Synthetic peptide
  Seed: HIHIFSFTGEEMATK
HIHIYSFVGPEMVTK

SEQ ID NO: 277609 - protein, 15 aa, Artificial Sequence
  Description of Artificial Sequence: Synthetic peptide
  Seed: HIHIFSFTGEEMATK
HIHIYSFVGSEMITK

SEQ ID NO: 277610 - protein, 15 aa, Artificial Sequence
  Description of Artificial Sequence: Synthetic peptide
  Seed: HIHIFSFTGEEMATK
HIHIYSFVGSEMLTK

SEQ ID NO: 277611 - protein, 15 aa, Artificial Sequence
  Description of Artificial Sequence: Synthetic peptide
  Seed: HIHIFSFTGEEMATK
HIHIYSFVGSEMMTK

SEQ ID NO: 277612 - protein, 15 aa, Artificial Sequence
  Description of Artificial Sequence: Synthetic peptide
  Seed: HIHIFSFTGEEMATK
HIHIYSFVGSEMVTK

SEQ ID NO: 277613 - protein, 15 aa, Artificial Sequence
  Description of Artificial Sequence: Synthetic peptide
  Seed: HIHIFSFTGEEMATK
HIHIYSFVGTEMITK

SEQ ID NO: 277614 - protein, 15 aa, Artificial Sequence
  Description of Artificial Sequence: Synthetic peptide
  Seed: HIHIFSFTGEEMATK
HIHIYSFVGTEMLTK

SEQ ID NO: 277615 - protein, 15 aa, Artificial Sequence
  Description of Artificial Sequence: Synthetic peptide
  Seed: HIHIFSFTGEEMATK
HIHIYSFVGTEMVTK

SEQ ID NO: 277616 - protein, 15 aa, Artificial Sequence
  Description of Artificial Sequence: Synthetic peptide
  Seed: HIHIFSFTGEEMATK
HIHIFSATGEEAATK

SEQ ID NO: 277617 - protein, 15 aa, Artificial Sequence
  Description of Artificial Sequence: Synthetic peptide
  Seed: HIHIFSFTGEEMATK
HIHIFSATGEEIATK

SEQ ID NO: 277618 - protein, 15 aa, Artificial Sequence
  Description of Artificial Sequence: Synthetic peptide
  Seed: HIHIFSFTGEEMATK
HIHIFSATGEELATK

SEQ ID NO: 277619 - protein, 15 aa, Artificial Sequence
  Description of Artificial Sequence: Synthetic peptide
  Seed: HIHIFSFTGEEMATK
HIHIFSATGEEVATK

SEQ ID NO: 277620 - protein, 15 aa, Artificial Sequence
  Description of Artificial Sequence: Synthetic peptide
  Seed: HIHIFSFTGEEMATK
HIHIFSITGEEAATK

SEQ ID NO: 277621 - protein, 15 aa, Artificial Sequence
  Description of Artificial Sequence: Synthetic peptide
  Seed: HIHIFSFTGEEMATK
HIHIFSITGEEIATK

SEQ ID NO: 277622 - protein, 15 aa, Artificial Sequence
  Description of Artificial Sequence: Synthetic peptide
  Seed: HIHIFSFTGEEMATK
HIHIFSITGEELATK

SEQ ID NO: 277623 - protein, 15 aa, Artificial Sequence
  Description of Artificial Sequence: Synthetic peptide
  Seed: HIHIFSFTGEEMATK
HIHIFSITGEEMATK

SEQ ID NO: 277624 - protein, 15 aa, Artificial Sequence
  Description of Artificial Sequence: Synthetic peptide
  Seed: HIHIFSFTGEEMATK
HIHIFSITGEETATK

SEQ ID NO: 277625 - protein, 15 aa, Artificial Sequence
  Description of Artificial Sequence: Synthetic peptide
  Seed: HIHIFSFTGEEMATK
HIHIFSITGEEVATK

SEQ ID NO: 277626 - protein, 15 aa, Artificial Sequence
  Description of Artificial Sequence: Synthetic peptide
  Seed: HIHIFSFTGEEMATK
HIHIFSLTGEEAATK

SEQ ID NO: 277627 - protein, 15 aa, Artificial Sequence
  Description of Artificial Sequence: Synthetic peptide
  Seed: HIHIFSFTGEEMATK
HIHIFSLTGEEGATK

SEQ ID NO: 277628 - protein, 15 aa, Artificial Sequence
  Description of Artificial Sequence: Synthetic peptide
  Seed: HIHIFSFTGEEMATK
HIHIFSLTGEEIATK

SEQ ID NO: 277629 - protein, 15 aa, Artificial Sequence
  Description of Artificial Sequence: Synthetic peptide
  Seed: HIHIFSFTGEEMATK
HIHIFSLTGEELATK

SEQ ID NO: 277630 - protein, 15 aa, Artificial Sequence
  Description of Artificial Sequence: Synthetic peptide
  Seed: HIHIFSFTGEEMATK
HIHIFSLTGEEMATK

SEQ ID NO: 277631 - protein, 15 aa, Artificial Sequence
  Description of Artificial Sequence: Synthetic peptide
  Seed: HIHIFSFTGEEMATK
HIHIFSLTGEESATK

SEQ ID NO: 277632 - protein, 15 aa, Artificial Sequence
  Description of Artificial Sequence: Synthetic peptide
  Seed: HIHIFSFTGEEMATK
HIHIFSLTGEETATK

SEQ ID NO: 277633 - protein, 15 aa, Artificial Sequence
  Description of Artificial Sequence: Synthetic peptide
  Seed: HIHIFSFTGEEMATK
HIHIFSLTGEEVATK

SEQ ID NO: 277634 - protein, 15 aa, Artificial Sequence
  Description of Artificial Sequence: Synthetic peptide
  Seed: HIHIFSFTGEEMATK
HIHIFSMTGEEAATK

SEQ ID NO: 277635 - protein, 15 aa, Artificial Sequence
  Description of Artificial Sequence: Synthetic peptide
  Seed: HIHIFSFTGEEMATK
HIHIFSMTGEEIATK

SEQ ID NO: 277636 - protein, 15 aa, Artificial Sequence
  Description of Artificial Sequence: Synthetic peptide
  Seed: HIHIFSFTGEEMATK
HIHIFSMTGEELATK

SEQ ID NO: 277637 - protein, 15 aa, Artificial Sequence
  Description of Artificial Sequence: Synthetic peptide
  Seed: HIHIFSFTGEEMATK
HIHIFSMTGEEMATK

SEQ ID NO: 277638 - protein, 15 aa, Artificial Sequence
  Description of Artificial Sequence: Synthetic peptide
  Seed: HIHIFSFTGEEMATK
HIHIFSMTGEESATK

SEQ ID NO: 277639 - protein, 15 aa, Artificial Sequence
  Description of Artificial Sequence: Synthetic peptide
  Seed: HIHIFSFTGEEMATK
HIHIFSMTGEETATK

SEQ ID NO: 277640 - protein, 15 aa, Artificial Sequence
  Description of Artificial Sequence: Synthetic peptide
  Seed: HIHIFSFTGEEMATK
HIHIFSMTGEEVATK

SEQ ID NO: 277641 - protein, 15 aa, Artificial Sequence
  Description of Artificial Sequence: Synthetic peptide
  Seed: HIHIFSFTGEEMATK
HIHIFSVTGEEAATK

SEQ ID NO: 277642 - protein, 15 aa, Artificial Sequence
  Description of Artificial Sequence: Synthetic peptide
  Seed: HIHIFSFTGEEMATK
HIHIFSVTGEEIATK

SEQ ID NO: 277643 - protein, 15 aa, Artificial Sequence
  Description of Artificial Sequence: Synthetic peptide
  Seed: HIHIFSFTGEEMATK
HIHIFSVTGEELATK

SEQ ID NO: 277644 - protein, 15 aa, Artificial Sequence
  Description of Artificial Sequence: Synthetic peptide
  Seed: HIHIFSFTGEEMATK
HIHIFSVTGEEVATK

SEQ ID NO: 277645 - protein, 15 aa, Artificial Sequence
  Description of Artificial Sequence: Synthetic peptide
  Seed: HIHIFSFTGEEMATK
HIHAFSFTFEEFATK

SEQ ID NO: 277646 - protein, 15 aa, Artificial Sequence
  Description of Artificial Sequence: Synthetic peptide
  Seed: HIHIFSFTGEEMATK
HIHAFSFTFEEIATK

SEQ ID NO: 277647 - protein, 15 aa, Artificial Sequence
  Description of Artificial Sequence: Synthetic peptide
  Seed: HIHIFSFTGEEMATK
HIHAFSFTFEELATK

SEQ ID NO: 277648 - protein, 15 aa, Artificial Sequence
  Description of Artificial Sequence: Synthetic peptide
  Seed: HIHIFSFTGEEMATK
HIHAFSFTFEEMATK

SEQ ID NO: 277649 - protein, 15 aa, Artificial Sequence
  Description of Artificial Sequence: Synthetic peptide
  Seed: HIHIFSFTGEEMATK
HIHAFSFTFEEVATK

SEQ ID NO: 277650 - protein, 15 aa, Artificial Sequence
  Description of Artificial Sequence: Synthetic peptide
  Seed: HIHIFSFTGEEMATK
HIHAFSITFEEFATK

SEQ ID NO: 277651 - protein, 15 aa, Artificial Sequence
  Description of Artificial Sequence: Synthetic peptide
  Seed: HIHIFSFTGEEMATK
HIHAFSITFEEIATK

SEQ ID NO: 277652 - protein, 15 aa, Artificial Sequence
  Description of Artificial Sequence: Synthetic peptide
  Seed: HIHIFSFTGEEMATK
HIHAFSITFEELATK

SEQ ID NO: 277653 - protein, 15 aa, Artificial Sequence
  Description of Artificial Sequence: Synthetic peptide
  Seed: HIHIFSFTGEEMATK
HIHAFSITFEEVATK

SEQ ID NO: 277654 - protein, 15 aa, Artificial Sequence
  Description of Artificial Sequence: Synthetic peptide
  Seed: HIHIFSFTGEEMATK
HIHAFSLTFEEFATK

SEQ ID NO: 277655 - protein, 15 aa, Artificial Sequence
  Description of Artificial Sequence: Synthetic peptide
  Seed: HIHIFSFTGEEMATK
HIHAFSLTFEEIATK

SEQ ID NO: 277656 - protein, 15 aa, Artificial Sequence
  Description of Artificial Sequence: Synthetic peptide
  Seed: HIHIFSFTGEEMATK
HIHAFSLTFEELATK

SEQ ID NO: 277657 - protein, 15 aa, Artificial Sequence
  Description of Artificial Sequence: Synthetic peptide
  Seed: HIHIFSFTGEEMATK
HIHAFSLTFEEVATK

SEQ ID NO: 277658 - protein, 15 aa, Artificial Sequence
  Description of Artificial Sequence: Synthetic peptide
  Seed: HIHIFSFTGEEMATK
HIHAFSTTFEEIATK

SEQ ID NO: 277659 - protein, 15 aa, Artificial Sequence
  Description of Artificial Sequence: Synthetic peptide
  Seed: HIHIFSFTGEEMATK
HIHAFSTTFEELATK

SEQ ID NO: 277660 - protein, 15 aa, Artificial Sequence
  Description of Artificial Sequence: Synthetic peptide
  Seed: HIHIFSFTGEEMATK
HIHAFSVTFEEIATK

SEQ ID NO: 277661 - protein, 15 aa, Artificial Sequence
  Description of Artificial Sequence: Synthetic peptide
  Seed: HIHIFSFTGEEMATK
HIHAFSVTFEELATK

SEQ ID NO: 277662 - protein, 15 aa, Artificial Sequence
  Description of Artificial Sequence: Synthetic peptide
  Seed: HIHIFSFTGEEMATK
HIHAFSVTFEEVATK

SEQ ID NO: 277663 - protein, 15 aa, Artificial Sequence
  Description of Artificial Sequence: Synthetic peptide
  Seed: HIHIFSFTGEEMATK
HIHCFSATFEEFATK

SEQ ID NO: 277664 - protein, 15 aa, Artificial Sequence
  Description of Artificial Sequence: Synthetic peptide
  Seed: HIHIFSFTGEEMATK
HIHCFSATFEEIATK

SEQ ID NO: 277665 - protein, 15 aa, Artificial Sequence
  Description of Artificial Sequence: Synthetic peptide
  Seed: HIHIFSFTGEEMATK
HIHCFSATFEELATK

SEQ ID NO: 277666 - protein, 15 aa, Artificial Sequence
  Description of Artificial Sequence: Synthetic peptide
  Seed: HIHIFSFTGEEMATK
HIHCFSATFEEVATK

SEQ ID NO: 277667 - protein, 15 aa, Artificial Sequence
  Description of Artificial Sequence: Synthetic peptide
  Seed: HIHIFSFTGEEMATK
HIHCFSETFEEIATK

SEQ ID NO: 277668 - protein, 15 aa, Artificial Sequence
  Description of Artificial Sequence: Synthetic peptide
  Seed: HIHIFSFTGEEMATK
HIHCFSETFEELATK

SEQ ID NO: 277669 - protein, 15 aa, Artificial Sequence
  Description of Artificial Sequence: Synthetic peptide
  Seed: HIHIFSFTGEEMATK
HIHCFSFTFEEFATK

SEQ ID NO: 277670 - protein, 15 aa, Artificial Sequence
  Description of Artificial Sequence: Synthetic peptide
  Seed: HIHIFSFTGEEMATK
HIHCFSFTFEEIATK

SEQ ID NO: 277671 - protein, 15 aa, Artificial Sequence
  Description of Artificial Sequence: Synthetic peptide
  Seed: HIHIFSFTGEEMATK
HIHCFSFTFEELATK

SEQ ID NO: 277672 - protein, 15 aa, Artificial Sequence
  Description of Artificial Sequence: Synthetic peptide
  Seed: HIHIFSFTGEEMATK
HIHCFSFTFEEMATK

SEQ ID NO: 277673 - protein, 15 aa, Artificial Sequence
  Description of Artificial Sequence: Synthetic peptide
  Seed: HIHIFSFTGEEMATK
HIHCFSFTFEEVATK

SEQ ID NO: 277674 - protein, 15 aa, Artificial Sequence
  Description of Artificial Sequence: Synthetic peptide
  Seed: HIHIFSFTGEEMATK
HIHCFSFTFEEYATK

SEQ ID NO: 277675 - protein, 15 aa, Artificial Sequence
  Description of Artificial Sequence: Synthetic peptide
  Seed: HIHIFSFTGEEMATK
HIHCFSFTLEEIATK

SEQ ID NO: 277676 - protein, 15 aa, Artificial Sequence
  Description of Artificial Sequence: Synthetic peptide
  Seed: HIHIFSFTGEEMATK
HIHCFSFTLEELATK

SEQ ID NO: 277677 - protein, 15 aa, Artificial Sequence
  Description of Artificial Sequence: Synthetic peptide
  Seed: HIHIFSFTGEEMATK
HIHCFSFTLEEVATK

SEQ ID NO: 277678 - protein, 15 aa, Artificial Sequence
  Description of Artificial Sequence: Synthetic peptide
  Seed: HIHIFSFTGEEMATK
HIHCFSFTWEEIATK

SEQ ID NO: 277679 - protein, 15 aa, Artificial Sequence
  Description of Artificial Sequence: Synthetic peptide
  Seed: HIHIFSFTGEEMATK
HIHCFSFTYEEFATK

SEQ ID NO: 277680 - protein, 15 aa, Artificial Sequence
  Description of Artificial Sequence: Synthetic peptide
  Seed: HIHIFSFTGEEMATK
HIHCFSFTYEEIATK

SEQ ID NO: 277681 - protein, 15 aa, Artificial Sequence
  Description of Artificial Sequence: Synthetic peptide
  Seed: HIHIFSFTGEEMATK
HIHCFSFTYEELATK

SEQ ID NO: 277682 - protein, 15 aa, Artificial Sequence
  Description of Artificial Sequence: Synthetic peptide
  Seed: HIHIFSFTGEEMATK
HIHCFSFTYEEVATK

SEQ ID NO: 277683 - protein, 15 aa, Artificial Sequence
  Description of Artificial Sequence: Synthetic peptide
  Seed: HIHIFSFTGEEMATK
HIHCFSHTFEEIATK

SEQ ID NO: 277684 - protein, 15 aa, Artificial Sequence
  Description of Artificial Sequence: Synthetic peptide
  Seed: HIHIFSFTGEEMATK
HIHCFSHTFEELATK

SEQ ID NO: 277685 - protein, 15 aa, Artificial Sequence
  Description of Artificial Sequence: Synthetic peptide
  Seed: HIHIFSFTGEEMATK
HIHCFSHTFEEVATK

SEQ ID NO: 277686 - protein, 15 aa, Artificial Sequence
  Description of Artificial Sequence: Synthetic peptide
  Seed: HIHIFSFTGEEMATK
HIHCFSITFEEAATK

SEQ ID NO: 277687 - protein, 15 aa, Artificial Sequence
  Description of Artificial Sequence: Synthetic peptide
  Seed: HIHIFSFTGEEMATK
HIHCFSITFEEFATK

SEQ ID NO: 277688 - protein, 15 aa, Artificial Sequence
  Description of Artificial Sequence: Synthetic peptide
  Seed: HIHIFSFTGEEMATK
HIHCFSITFEEIATK

SEQ ID NO: 277689 - protein, 15 aa, Artificial Sequence
  Description of Artificial Sequence: Synthetic peptide
  Seed: HIHIFSFTGEEMATK
HIHCFSITFEELATK

SEQ ID NO: 277690 - protein, 15 aa, Artificial Sequence
  Description of Artificial Sequence: Synthetic peptide
  Seed: HIHIFSFTGEEMATK
HIHCFSITFEEMATK

SEQ ID NO: 277691 - protein, 15 aa, Artificial Sequence
  Description of Artificial Sequence: Synthetic peptide
  Seed: HIHIFSFTGEEMATK
HIHCFSITFEETATK

SEQ ID NO: 277692 - protein, 15 aa, Artificial Sequence
  Description of Artificial Sequence: Synthetic peptide
  Seed: HIHIFSFTGEEMATK
HIHCFSITFEEVATK

SEQ ID NO: 277693 - protein, 15 aa, Artificial Sequence
  Description of Artificial Sequence: Synthetic peptide
  Seed: HIHIFSFTGEEMATK
HIHCFSITFEEYATK

SEQ ID NO: 277694 - protein, 15 aa, Artificial Sequence
  Description of Artificial Sequence: Synthetic peptide
  Seed: HIHIFSFTGEEMATK
HIHCFSITLEELATK

SEQ ID NO: 277695 - protein, 15 aa, Artificial Sequence
  Description of Artificial Sequence: Synthetic peptide
  Seed: HIHIFSFTGEEMATK
HIHCFSITYEEFATK

SEQ ID NO: 277696 - protein, 15 aa, Artificial Sequence
  Description of Artificial Sequence: Synthetic peptide
  Seed: HIHIFSFTGEEMATK
HIHCFSITYEEIATK

SEQ ID NO: 277697 - protein, 15 aa, Artificial Sequence
  Description of Artificial Sequence: Synthetic peptide
  Seed: HIHIFSFTGEEMATK
HIHCFSITYEELATK

SEQ ID NO: 277698 - protein, 15 aa, Artificial Sequence
  Description of Artificial Sequence: Synthetic peptide
  Seed: HIHIFSFTGEEMATK
HIHCFSITYEEVATK

SEQ ID NO: 277699 - protein, 15 aa, Artificial Sequence
  Description of Artificial Sequence: Synthetic peptide
  Seed: HIHIFSFTGEEMATK
HIHCFSLTFEEFATK

SEQ ID NO: 277700 - protein, 15 aa, Artificial Sequence
  Description of Artificial Sequence: Synthetic peptide
  Seed: HIHIFSFTGEEMATK
HIHCFSLTFEEIATK

SEQ ID NO: 277701 - protein, 15 aa, Artificial Sequence
  Description of Artificial Sequence: Synthetic peptide
  Seed: HIHIFSFTGEEMATK
HIHCFSLTFEELATK

SEQ ID NO: 277702 - protein, 15 aa, Artificial Sequence
  Description of Artificial Sequence: Synthetic peptide
  Seed: HIHIFSFTGEEMATK
HIHCFSLTFEEMATK

SEQ ID NO: 277703 - protein, 15 aa, Artificial Sequence
  Description of Artificial Sequence: Synthetic peptide
  Seed: HIHIFSFTGEEMATK
HIHCFSLTFEEVATK

SEQ ID NO: 277704 - protein, 15 aa, Artificial Sequence
  Description of Artificial Sequence: Synthetic peptide
  Seed: HIHIFSFTGEEMATK
HIHCFSLTFEEYATK

SEQ ID NO: 277705 - protein, 15 aa, Artificial Sequence
  Description of Artificial Sequence: Synthetic peptide
  Seed: HIHIFSFTGEEMATK
HIHCFSLTYEELATK

SEQ ID NO: 277706 - protein, 15 aa, Artificial Sequence
  Description of Artificial Sequence: Synthetic peptide
  Seed: HIHIFSFTGEEMATK
HIHCFSMTFEEFATK

SEQ ID NO: 277707 - protein, 15 aa, Artificial Sequence
  Description of Artificial Sequence: Synthetic peptide
  Seed: HIHIFSFTGEEMATK
HIHCFSMTFEEIATK

SEQ ID NO: 277708 - protein, 15 aa, Artificial Sequence
  Description of Artificial Sequence: Synthetic peptide
  Seed: HIHIFSFTGEEMATK
HIHCFSMTFEELATK

SEQ ID NO: 277709 - protein, 15 aa, Artificial Sequence
  Description of Artificial Sequence: Synthetic peptide
  Seed: HIHIFSFTGEEMATK
HIHCFSMTFEEMATK

SEQ ID NO: 277710 - protein, 15 aa, Artificial Sequence
  Description of Artificial Sequence: Synthetic peptide
  Seed: HIHIFSFTGEEMATK
HIHCFSMTFEEVATK

SEQ ID NO: 277711 - protein, 15 aa, Artificial Sequence
  Description of Artificial Sequence: Synthetic peptide
  Seed: HIHIFSFTGEEMATK
HIHCFSQTFEEIATK

SEQ ID NO: 277712 - protein, 15 aa, Artificial Sequence
  Description of Artificial Sequence: Synthetic peptide
  Seed: HIHIFSFTGEEMATK
HIHCFSQTFEELATK

SEQ ID NO: 277713 - protein, 15 aa, Artificial Sequence
  Description of Artificial Sequence: Synthetic peptide
  Seed: HIHIFSFTGEEMATK
HIHCFSSTFEEFATK

SEQ ID NO: 277714 - protein, 15 aa, Artificial Sequence
  Description of Artificial Sequence: Synthetic peptide
  Seed: HIHIFSFTGEEMATK
HIHCFSSTFEEIATK

SEQ ID NO: 277715 - protein, 15 aa, Artificial Sequence
  Description of Artificial Sequence: Synthetic peptide
  Seed: HIHIFSFTGEEMATK
HIHCFSSTFEELATK

SEQ ID NO: 277716 - protein, 15 aa, Artificial Sequence
  Description of Artificial Sequence: Synthetic peptide
  Seed: HIHIFSFTGEEMATK
HIHCFSSTFEEVATK

SEQ ID NO: 277717 - protein, 15 aa, Artificial Sequence
  Description of Artificial Sequence: Synthetic peptide
  Seed: HIHIFSFTGEEMATK
HIHCFSTTFEEFATK

SEQ ID NO: 277718 - protein, 15 aa, Artificial Sequence
  Description of Artificial Sequence: Synthetic peptide
  Seed: HIHIFSFTGEEMATK
HIHCFSTTFEEIATK

SEQ ID NO: 277719 - protein, 15 aa, Artificial Sequence
  Description of Artificial Sequence: Synthetic peptide
  Seed: HIHIFSFTGEEMATK
HIHCFSTTFEELATK

SEQ ID NO: 277720 - protein, 15 aa, Artificial Sequence
  Description of Artificial Sequence: Synthetic peptide
  Seed: HIHIFSFTGEEMATK
HIHCFSTTFEEMATK

SEQ ID NO: 277721 - protein, 15 aa, Artificial Sequence
  Description of Artificial Sequence: Synthetic peptide
  Seed: HIHIFSFTGEEMATK
HIHCFSTTFEEVATK

SEQ ID NO: 277722 - protein, 15 aa, Artificial Sequence
  Description of Artificial Sequence: Synthetic peptide
  Seed: HIHIFSFTGEEMATK
HIHCFSVTFEEFATK

SEQ ID NO: 277723 - protein, 15 aa, Artificial Sequence
  Description of Artificial Sequence: Synthetic peptide
  Seed: HIHIFSFTGEEMATK
HIHCFSVTFEEIATK

SEQ ID NO: 277724 - protein, 15 aa, Artificial Sequence
  Description of Artificial Sequence: Synthetic peptide
  Seed: HIHIFSFTGEEMATK
HIHCFSVTFEELATK

SEQ ID NO: 277725 - protein, 15 aa, Artificial Sequence
  Description of Artificial Sequence: Synthetic peptide
  Seed: HIHIFSFTGEEMATK
HIHCFSVTFEEMATK

SEQ ID NO: 277726 - protein, 15 aa, Artificial Sequence
  Description of Artificial Sequence: Synthetic peptide
  Seed: HIHIFSFTGEEMATK
HIHCFSVTFEEVATK

SEQ ID NO: 277727 - protein, 15 aa, Artificial Sequence
  Description of Artificial Sequence: Synthetic peptide
  Seed: HIHIFSFTGEEMATK
HIHCFSVTFEEYATK

SEQ ID NO: 277728 - protein, 15 aa, Artificial Sequence
  Description of Artificial Sequence: Synthetic peptide
  Seed: HIHIFSFTGEEMATK
HIHCFSVTYEELATK

SEQ ID NO: 277729 - protein, 15 aa, Artificial Sequence
  Description of Artificial Sequence: Synthetic peptide
  Seed: HIHIFSFTGEEMATK
HIHCFSYTFEEIATK

SEQ ID NO: 277730 - protein, 15 aa, Artificial Sequence
  Description of Artificial Sequence: Synthetic peptide
  Seed: HIHIFSFTGEEMATK
HIHCFSYTFEELATK

SEQ ID NO: 277731 - protein, 15 aa, Artificial Sequence
  Description of Artificial Sequence: Synthetic peptide
  Seed: HIHIFSFTGEEMATK
HIHCFSYTFEEVATK

SEQ ID NO: 277732 - protein, 15 aa, Artificial Sequence
  Description of Artificial Sequence: Synthetic peptide
  Seed: HIHIFSFTGEEMATK
HIHFFSATAEEAATK

SEQ ID NO: 277733 - protein, 15 aa, Artificial Sequence
  Description of Artificial Sequence: Synthetic peptide
  Seed: HIHIFSFTGEEMATK
HIHFFSATAEEEATK

SEQ ID NO: 277734 - protein, 15 aa, Artificial Sequence
  Description of Artificial Sequence: Synthetic peptide
  Seed: HIHIFSFTGEEMATK
HIHFFSATAEEFATK

SEQ ID NO: 277735 - protein, 15 aa, Artificial Sequence
  Description of Artificial Sequence: Synthetic peptide
  Seed: HIHIFSFTGEEMATK
HIHFFSATAEEGATK

SEQ ID NO: 277736 - protein, 15 aa, Artificial Sequence
  Description of Artificial Sequence: Synthetic peptide
  Seed: HIHIFSFTGEEMATK
HIHFFSATAEEHATK

SEQ ID NO: 277737 - protein, 15 aa, Artificial Sequence
  Description of Artificial Sequence: Synthetic peptide
  Seed: HIHIFSFTGEEMATK
HIHFFSATAEEIATK

SEQ ID NO: 277738 - protein, 15 aa, Artificial Sequence
  Description of Artificial Sequence: Synthetic peptide
  Seed: HIHIFSFTGEEMATK
HIHFFSATAEELATK

SEQ ID NO: 277739 - protein, 15 aa, Artificial Sequence
  Description of Artificial Sequence: Synthetic peptide
  Seed: HIHIFSFTGEEMATK
HIHFFSATAEEMATK

SEQ ID NO: 277740 - protein, 15 aa, Artificial Sequence
  Description of Artificial Sequence: Synthetic peptide
  Seed: HIHIFSFTGEEMATK
HIHFFSATAEENATK

SEQ ID NO: 277741 - protein, 15 aa, Artificial Sequence
  Description of Artificial Sequence: Synthetic peptide
  Seed: HIHIFSFTGEEMATK
HIHFFSATAEEPATK

SEQ ID NO: 277742 - protein, 15 aa, Artificial Sequence
  Description of Artificial Sequence: Synthetic peptide
  Seed: HIHIFSFTGEEMATK
HIHFFSATAEEQATK

SEQ ID NO: 277743 - protein, 15 aa, Artificial Sequence
  Description of Artificial Sequence: Synthetic peptide
  Seed: HIHIFSFTGEEMATK
HIHFFSATAEESATK

SEQ ID NO: 277744 - protein, 15 aa, Artificial Sequence
  Description of Artificial Sequence: Synthetic peptide
  Seed: HIHIFSFTGEEMATK
HIHFFSATAEETATK

SEQ ID NO: 277745 - protein, 15 aa, Artificial Sequence
  Description of Artificial Sequence: Synthetic peptide
  Seed: HIHIFSFTGEEMATK
HIHFFSATAEEVATK

SEQ ID NO: 277746 - protein, 15 aa, Artificial Sequence
  Description of Artificial Sequence: Synthetic peptide
  Seed: HIHIFSFTGEEMATK
HIHFFSATAEEYATK

SEQ ID NO: 277747 - protein, 15 aa, Artificial Sequence
  Description of Artificial Sequence: Synthetic peptide
  Seed: HIHIFSFTGEEMATK
HIHFFSATFEEAATK

SEQ ID NO: 277748 - protein, 15 aa, Artificial Sequence
  Description of Artificial Sequence: Synthetic peptide
  Seed: HIHIFSFTGEEMATK
HIHFFSATFEECATK

SEQ ID NO: 277749 - protein, 15 aa, Artificial Sequence
  Description of Artificial Sequence: Synthetic peptide
  Seed: HIHIFSFTGEEMATK
HIHFFSATFEEDATK

SEQ ID NO: 277750 - protein, 15 aa, Artificial Sequence
  Description of Artificial Sequence: Synthetic peptide
  Seed: HIHIFSFTGEEMATK
HIHFFSATFEEEATK

SEQ ID NO: 277751 - protein, 15 aa, Artificial Sequence
  Description of Artificial Sequence: Synthetic peptide
  Seed: HIHIFSFTGEEMATK
HIHFFSATFEEFATK

SEQ ID NO: 277752 - protein, 15 aa, Artificial Sequence
  Description of Artificial Sequence: Synthetic peptide
  Seed: HIHIFSFTGEEMATK
HIHFFSATFEEGATK

SEQ ID NO: 277753 - protein, 15 aa, Artificial Sequence
  Description of Artificial Sequence: Synthetic peptide
  Seed: HIHIFSFTGEEMATK
HIHFFSATFEEHATK

SEQ ID NO: 277754 - protein, 15 aa, Artificial Sequence
  Description of Artificial Sequence: Synthetic peptide
  Seed: HIHIFSFTGEEMATK
HIHFFSATFEEIATK

SEQ ID NO: 277755 - protein, 15 aa, Artificial Sequence
  Description of Artificial Sequence: Synthetic peptide
  Seed: HIHIFSFTGEEMATK
HIHFFSATFEEKATK

SEQ ID NO: 277756 - protein, 15 aa, Artificial Sequence
  Description of Artificial Sequence: Synthetic peptide
  Seed: HIHIFSFTGEEMATK
HIHFFSATFEELATK

SEQ ID NO: 277757 - protein, 15 aa, Artificial Sequence
  Description of Artificial Sequence: Synthetic peptide
  Seed: HIHIFSFTGEEMATK
HIHFFSATFEEMATK

SEQ ID NO: 277758 - protein, 15 aa, Artificial Sequence
  Description of Artificial Sequence: Synthetic peptide
  Seed: HIHIFSFTGEEMATK
HIHFFSATFEENATK

SEQ ID NO: 277759 - protein, 15 aa, Artificial Sequence
  Description of Artificial Sequence: Synthetic peptide
  Seed: HIHIFSFTGEEMATK
HIHFFSATFEEPATK

SEQ ID NO: 277760 - protein, 15 aa, Artificial Sequence
  Description of Artificial Sequence: Synthetic peptide
  Seed: HIHIFSFTGEEMATK
HIHFFSATFEEQATK

SEQ ID NO: 277761 - protein, 15 aa, Artificial Sequence
  Description of Artificial Sequence: Synthetic peptide
  Seed: HIHIFSFTGEEMATK
HIHFFSATFEERATK

SEQ ID NO: 277762 - protein, 15 aa, Artificial Sequence
  Description of Artificial Sequence: Synthetic peptide
  Seed: HIHIFSFTGEEMATK
HIHFFSATFEESATK

SEQ ID NO: 277763 - protein, 15 aa, Artificial Sequence
  Description of Artificial Sequence: Synthetic peptide
  Seed: HIHIFSFTGEEMATK
HIHFFSATFEETATK

SEQ ID NO: 277764 - protein, 15 aa, Artificial Sequence
  Description of Artificial Sequence: Synthetic peptide
  Seed: HIHIFSFTGEEMATK
HIHFFSATFEEVATK

SEQ ID NO: 277765 - protein, 15 aa, Artificial Sequence
  Description of Artificial Sequence: Synthetic peptide
  Seed: HIHIFSFTGEEMATK
HIHFFSATFEEWATK

SEQ ID NO: 277766 - protein, 15 aa, Artificial Sequence
  Description of Artificial Sequence: Synthetic peptide
  Seed: HIHIFSFTGEEMATK
HIHFFSATFEEYATK

SEQ ID NO: 277767 - protein, 15 aa, Artificial Sequence
  Description of Artificial Sequence: Synthetic peptide
  Seed: HIHIFSFTGEEMATK
HIHFFSATGEEAATK

SEQ ID NO: 277768 - protein, 15 aa, Artificial Sequence
  Description of Artificial Sequence: Synthetic peptide
  Seed: HIHIFSFTGEEMATK
HIHFFSATGEEGATK

SEQ ID NO: 277769 - protein, 15 aa, Artificial Sequence
  Description of Artificial Sequence: Synthetic peptide
  Seed: HIHIFSFTGEEMATK
HIHFFSATGEEIATK

SEQ ID NO: 277770 - protein, 15 aa, Artificial Sequence
  Description of Artificial Sequence: Synthetic peptide
  Seed: HIHIFSFTGEEMATK
HIHFFSATGEELATK

SEQ ID NO: 277771 - protein, 15 aa, Artificial Sequence
  Description of Artificial Sequence: Synthetic peptide
  Seed: HIHIFSFTGEEMATK
HIHFFSATGEEMATK

SEQ ID NO: 277772 - protein, 15 aa, Artificial Sequence
  Description of Artificial Sequence: Synthetic peptide
  Seed: HIHIFSFTGEEMATK
HIHFFSATGEENATK

SEQ ID NO: 277773 - protein, 15 aa, Artificial Sequence
  Description of Artificial Sequence: Synthetic peptide
  Seed: HIHIFSFTGEEMATK
HIHFFSATGEESATK

SEQ ID NO: 277774 - protein, 15 aa, Artificial Sequence
  Description of Artificial Sequence: Synthetic peptide
  Seed: HIHIFSFTGEEMATK
HIHFFSATGEETATK

SEQ ID NO: 277775 - protein, 15 aa, Artificial Sequence
  Description of Artificial Sequence: Synthetic peptide
  Seed: HIHIFSFTGEEMATK
HIHFFSATGEEVATK

SEQ ID NO: 277776 - protein, 15 aa, Artificial Sequence
  Description of Artificial Sequence: Synthetic peptide
  Seed: HIHIFSFTGEEMATK
HIHFFSATIEEFATK

SEQ ID NO: 277777 - protein, 15 aa, Artificial Sequence
  Description of Artificial Sequence: Synthetic peptide
  Seed: HIHIFSFTGEEMATK
HIHFFSATIEEGATK

SEQ ID NO: 277778 - protein, 15 aa, Artificial Sequence
  Description of Artificial Sequence: Synthetic peptide
  Seed: HIHIFSFTGEEMATK
HIHFFSATIEEHATK

SEQ ID NO: 277779 - protein, 15 aa, Artificial Sequence
  Description of Artificial Sequence: Synthetic peptide
  Seed: HIHIFSFTGEEMATK
HIHFFSATIEEIATK

SEQ ID NO: 277780 - protein, 15 aa, Artificial Sequence
  Description of Artificial Sequence: Synthetic peptide
  Seed: HIHIFSFTGEEMATK
HIHFFSATIEELATK

SEQ ID NO: 277781 - protein, 15 aa, Artificial Sequence
  Description of Artificial Sequence: Synthetic peptide
  Seed: HIHIFSFTGEEMATK
HIHFFSATIEEMATK

SEQ ID NO: 277782 - protein, 15 aa, Artificial Sequence
  Description of Artificial Sequence: Synthetic peptide
  Seed: HIHIFSFTGEEMATK
HIHFFSATIEENATK

SEQ ID NO: 277783 - protein, 15 aa, Artificial Sequence
  Description of Artificial Sequence: Synthetic peptide
  Seed: HIHIFSFTGEEMATK
HIHFFSATIEEPATK

SEQ ID NO: 277784 - protein, 15 aa, Artificial Sequence
  Description of Artificial Sequence: Synthetic peptide
  Seed: HIHIFSFTGEEMATK
HIHFFSATIEEQATK

SEQ ID NO: 277785 - protein, 15 aa, Artificial Sequence
  Description of Artificial Sequence: Synthetic peptide
  Seed: HIHIFSFTGEEMATK
HIHFFSATIEESATK

SEQ ID NO: 277786 - protein, 15 aa, Artificial Sequence
  Description of Artificial Sequence: Synthetic peptide
  Seed: HIHIFSFTGEEMATK
HIHFFSATIEETATK

SEQ ID NO: 277787 - protein, 15 aa, Artificial Sequence
  Description of Artificial Sequence: Synthetic peptide
  Seed: HIHIFSFTGEEMATK
HIHFFSATIEEVATK

SEQ ID NO: 277788 - protein, 15 aa, Artificial Sequence
  Description of Artificial Sequence: Synthetic peptide
  Seed: HIHIFSFTGEEMATK
HIHFFSATIEEYATK

SEQ ID NO: 277789 - protein, 15 aa, Artificial Sequence
  Description of Artificial Sequence: Synthetic peptide
  Seed: HIHIFSFTGEEMATK
HIHFFSATLEEAATK

SEQ ID NO: 277790 - protein, 15 aa, Artificial Sequence
  Description of Artificial Sequence: Synthetic peptide
  Seed: HIHIFSFTGEEMATK
HIHFFSATLEEDATK

SEQ ID NO: 277791 - protein, 15 aa, Artificial Sequence
  Description of Artificial Sequence: Synthetic peptide
  Seed: HIHIFSFTGEEMATK
HIHFFSATLEEEATK

SEQ ID NO: 277792 - protein, 15 aa, Artificial Sequence
  Description of Artificial Sequence: Synthetic peptide
  Seed: HIHIFSFTGEEMATK
HIHFFSATLEEFATK

SEQ ID NO: 277793 - protein, 15 aa, Artificial Sequence
  Description of Artificial Sequence: Synthetic peptide
  Seed: HIHIFSFTGEEMATK
HIHFFSATLEEHATK

SEQ ID NO: 277794 - protein, 15 aa, Artificial Sequence
  Description of Artificial Sequence: Synthetic peptide
  Seed: HIHIFSFTGEEMATK
HIHFFSATLEEIATK

SEQ ID NO: 277795 - protein, 15 aa, Artificial Sequence
  Description of Artificial Sequence: Synthetic peptide
  Seed: HIHIFSFTGEEMATK
HIHFFSATLEELATK

SEQ ID NO: 277796 - protein, 15 aa, Artificial Sequence
  Description of Artificial Sequence: Synthetic peptide
  Seed: HIHIFSFTGEEMATK
HIHFFSATLEEMATK

SEQ ID NO: 277797 - protein, 15 aa, Artificial Sequence
  Description of Artificial Sequence: Synthetic peptide
  Seed: HIHIFSFTGEEMATK
HIHFFSATLEENATK

SEQ ID NO: 277798 - protein, 15 aa, Artificial Sequence
  Description of Artificial Sequence: Synthetic peptide
  Seed: HIHIFSFTGEEMATK
HIHFFSATLEESATK

SEQ ID NO: 277799 - protein, 15 aa, Artificial Sequence
  Description of Artificial Sequence: Synthetic peptide
  Seed: HIHIFSFTGEEMATK
HIHFFSATLEETATK

SEQ ID NO: 277800 - protein, 15 aa, Artificial Sequence
  Description of Artificial Sequence: Synthetic peptide
  Seed: HIHIFSFTGEEMATK
HIHFFSATLEEVATK

SEQ ID NO: 277801 - protein, 15 aa, Artificial Sequence
  Description of Artificial Sequence: Synthetic peptide
  Seed: HIHIFSFTGEEMATK
HIHFFSATLEEYATK

SEQ ID NO: 277802 - protein, 15 aa, Artificial Sequence
  Description of Artificial Sequence: Synthetic peptide
  Seed: HIHIFSFTGEEMATK
HIHFFSATMEEAATK

SEQ ID NO: 277803 - protein, 15 aa, Artificial Sequence
  Description of Artificial Sequence: Synthetic peptide
  Seed: HIHIFSFTGEEMATK
HIHFFSATMEEFATK

SEQ ID NO: 277804 - protein, 15 aa, Artificial Sequence
  Description of Artificial Sequence: Synthetic peptide
  Seed: HIHIFSFTGEEMATK
HIHFFSATMEEHATK

SEQ ID NO: 277805 - protein, 15 aa, Artificial Sequence
  Description of Artificial Sequence: Synthetic peptide
  Seed: HIHIFSFTGEEMATK
HIHFFSATMEEIATK

SEQ ID NO: 277806 - protein, 15 aa, Artificial Sequence
  Description of Artificial Sequence: Synthetic peptide
  Seed: HIHIFSFTGEEMATK
HIHFFSATMEELATK

SEQ ID NO: 277807 - protein, 15 aa, Artificial Sequence
  Description of Artificial Sequence: Synthetic peptide
  Seed: HIHIFSFTGEEMATK
HIHFFSATMEEMATK

SEQ ID NO: 277808 - protein, 15 aa, Artificial Sequence
  Description of Artificial Sequence: Synthetic peptide
  Seed: HIHIFSFTGEEMATK
HIHFFSATMEENATK

SEQ ID NO: 277809 - protein, 15 aa, Artificial Sequence
  Description of Artificial Sequence: Synthetic peptide
  Seed: HIHIFSFTGEEMATK
HIHFFSATMEESATK

SEQ ID NO: 277810 - protein, 15 aa, Artificial Sequence
  Description of Artificial Sequence: Synthetic peptide
  Seed: HIHIFSFTGEEMATK
HIHFFSATMEETATK

SEQ ID NO: 277811 - protein, 15 aa, Artificial Sequence
  Description of Artificial Sequence: Synthetic peptide
  Seed: HIHIFSFTGEEMATK
HIHFFSATMEEVATK

SEQ ID NO: 277812 - protein, 15 aa, Artificial Sequence
  Description of Artificial Sequence: Synthetic peptide
  Seed: HIHIFSFTGEEMATK
HIHFFSATMEEYATK

SEQ ID NO: 277813 - protein, 15 aa, Artificial Sequence
  Description of Artificial Sequence: Synthetic peptide
  Seed: HIHIFSFTGEEMATK
HIHFFSATNEEAATK

SEQ ID NO: 277814 - protein, 15 aa, Artificial Sequence
  Description of Artificial Sequence: Synthetic peptide
  Seed: HIHIFSFTGEEMATK
HIHFFSATNEEIATK

SEQ ID NO: 277815 - protein, 15 aa, Artificial Sequence
  Description of Artificial Sequence: Synthetic peptide
  Seed: HIHIFSFTGEEMATK
HIHFFSATNEELATK

SEQ ID NO: 277816 - protein, 15 aa, Artificial Sequence
  Description of Artificial Sequence: Synthetic peptide
  Seed: HIHIFSFTGEEMATK
HIHFFSATNEEMATK

SEQ ID NO: 277817 - protein, 15 aa, Artificial Sequence
  Description of Artificial Sequence: Synthetic peptide
  Seed: HIHIFSFTGEEMATK
HIHFFSATNEENATK

SEQ ID NO: 277818 - protein, 15 aa, Artificial Sequence
  Description of Artificial Sequence: Synthetic peptide
  Seed: HIHIFSFTGEEMATK
HIHFFSATNEESATK

SEQ ID NO: 277819 - protein, 15 aa, Artificial Sequence
  Description of Artificial Sequence: Synthetic peptide
  Seed: HIHIFSFTGEEMATK
HIHFFSATNEETATK

SEQ ID NO: 277820 - protein, 15 aa, Artificial Sequence
  Description of Artificial Sequence: Synthetic peptide
  Seed: HIHIFSFTGEEMATK
HIHFFSATNEEVATK

SEQ ID NO: 277821 - protein, 15 aa, Artificial Sequence
  Description of Artificial Sequence: Synthetic peptide
  Seed: HIHIFSFTGEEMATK
HIHFFSATPEEAATK

SEQ ID NO: 277822 - protein, 15 aa, Artificial Sequence
  Description of Artificial Sequence: Synthetic peptide
  Seed: HIHIFSFTGEEMATK
HIHFFSATPEEGATK

SEQ ID NO: 277823 - protein, 15 aa, Artificial Sequence
  Description of Artificial Sequence: Synthetic peptide
  Seed: HIHIFSFTGEEMATK
HIHFFSATPEEHATK

SEQ ID NO: 277824 - protein, 15 aa, Artificial Sequence
  Description of Artificial Sequence: Synthetic peptide
  Seed: HIHIFSFTGEEMATK
HIHFFSATPEEIATK

SEQ ID NO: 277825 - protein, 15 aa, Artificial Sequence
  Description of Artificial Sequence: Synthetic peptide
  Seed: HIHIFSFTGEEMATK
HIHFFSATPEELATK

SEQ ID NO: 277826 - protein, 15 aa, Artificial Sequence
  Description of Artificial Sequence: Synthetic peptide
  Seed: HIHIFSFTGEEMATK
HIHFFSATPEEMATK

SEQ ID NO: 277827 - protein, 15 aa, Artificial Sequence
  Description of Artificial Sequence: Synthetic peptide
  Seed: HIHIFSFTGEEMATK
HIHFFSATPEENATK

SEQ ID NO: 277828 - protein, 15 aa, Artificial Sequence
  Description of Artificial Sequence: Synthetic peptide
  Seed: HIHIFSFTGEEMATK
HIHFFSATPEEPATK

SEQ ID NO: 277829 - protein, 15 aa, Artificial Sequence
  Description of Artificial Sequence: Synthetic peptide
  Seed: HIHIFSFTGEEMATK
HIHFFSATPEEQATK

SEQ ID NO: 277830 - protein, 15 aa, Artificial Sequence
  Description of Artificial Sequence: Synthetic peptide
  Seed: HIHIFSFTGEEMATK
HIHFFSATPEESATK

SEQ ID NO: 277831 - protein, 15 aa, Artificial Sequence
  Description of Artificial Sequence: Synthetic peptide
  Seed: HIHIFSFTGEEMATK
HIHFFSATPEETATK

SEQ ID NO: 277832 - protein, 15 aa, Artificial Sequence
  Description of Artificial Sequence: Synthetic peptide
  Seed: HIHIFSFTGEEMATK
HIHFFSATPEEVATK

SEQ ID NO: 277833 - protein, 15 aa, Artificial Sequence
  Description of Artificial Sequence: Synthetic peptide
  Seed: HIHIFSFTGEEMATK
HIHFFSATSEEGATK

SEQ ID NO: 277834 - protein, 15 aa, Artificial Sequence
  Description of Artificial Sequence: Synthetic peptide
  Seed: HIHIFSFTGEEMATK
HIHFFSATSEEHATK

SEQ ID NO: 277835 - protein, 15 aa, Artificial Sequence
  Description of Artificial Sequence: Synthetic peptide
  Seed: HIHIFSFTGEEMATK
HIHFFSATSEEIATK

SEQ ID NO: 277836 - protein, 15 aa, Artificial Sequence
  Description of Artificial Sequence: Synthetic peptide
  Seed: HIHIFSFTGEEMATK
HIHFFSATSEELATK

SEQ ID NO: 277837 - protein, 15 aa, Artificial Sequence
  Description of Artificial Sequence: Synthetic peptide
  Seed: HIHIFSFTGEEMATK
HIHFFSATSEEMATK

SEQ ID NO: 277838 - protein, 15 aa, Artificial Sequence
  Description of Artificial Sequence: Synthetic peptide
  Seed: HIHIFSFTGEEMATK
HIHFFSATSEENATK

SEQ ID NO: 277839 - protein, 15 aa, Artificial Sequence
  Description of Artificial Sequence: Synthetic peptide
  Seed: HIHIFSFTGEEMATK
HIHFFSATSEEQATK

SEQ ID NO: 277840 - protein, 15 aa, Artificial Sequence
  Description of Artificial Sequence: Synthetic peptide
  Seed: HIHIFSFTGEEMATK
HIHFFSATSEESATK

SEQ ID NO: 277841 - protein, 15 aa, Artificial Sequence
  Description of Artificial Sequence: Synthetic peptide
  Seed: HIHIFSFTGEEMATK
HIHFFSATSEETATK

SEQ ID NO: 277842 - protein, 15 aa, Artificial Sequence
  Description of Artificial Sequence: Synthetic peptide
  Seed: HIHIFSFTGEEMATK
HIHFFSATSEEVATK

SEQ ID NO: 277843 - protein, 15 aa, Artificial Sequence
  Description of Artificial Sequence: Synthetic peptide
  Seed: HIHIFSFTGEEMATK
HIHFFSATTEEAATK

SEQ ID NO: 277844 - protein, 15 aa, Artificial Sequence
  Description of Artificial Sequence: Synthetic peptide
  Seed: HIHIFSFTGEEMATK
HIHFFSATTEEGATK

SEQ ID NO: 277845 - protein, 15 aa, Artificial Sequence
  Description of Artificial Sequence: Synthetic peptide
  Seed: HIHIFSFTGEEMATK
HIHFFSATTEEHATK

SEQ ID NO: 277846 - protein, 15 aa, Artificial Sequence
  Description of Artificial Sequence: Synthetic peptide
  Seed: HIHIFSFTGEEMATK
HIHFFSATTEEIATK

SEQ ID NO: 277847 - protein, 15 aa, Artificial Sequence
  Description of Artificial Sequence: Synthetic peptide
  Seed: HIHIFSFTGEEMATK
HIHFFSATTEELATK

SEQ ID NO: 277848 - protein, 15 aa, Artificial Sequence
  Description of Artificial Sequence: Synthetic peptide
  Seed: HIHIFSFTGEEMATK
HIHFFSATTEEMATK

SEQ ID NO: 277849 - protein, 15 aa, Artificial Sequence
  Description of Artificial Sequence: Synthetic peptide
  Seed: HIHIFSFTGEEMATK
HIHFFSATTEENATK

SEQ ID NO: 277850 - protein, 15 aa, Artificial Sequence
  Description of Artificial Sequence: Synthetic peptide
  Seed: HIHIFSFTGEEMATK
HIHFFSATTEEQATK

SEQ ID NO: 277851 - protein, 15 aa, Artificial Sequence
  Description of Artificial Sequence: Synthetic peptide
  Seed: HIHIFSFTGEEMATK
HIHFFSATTEESATK

SEQ ID NO: 277852 - protein, 15 aa, Artificial Sequence
  Description of Artificial Sequence: Synthetic peptide
  Seed: HIHIFSFTGEEMATK
HIHFFSATTEETATK

SEQ ID NO: 277853 - protein, 15 aa, Artificial Sequence
  Description of Artificial Sequence: Synthetic peptide
  Seed: HIHIFSFTGEEMATK
HIHFFSATTEEVATK

SEQ ID NO: 277854 - protein, 15 aa, Artificial Sequence
  Description of Artificial Sequence: Synthetic peptide
  Seed: HIHIFSFTGEEMATK
HIHFFSATVEEAATK

SEQ ID NO: 277855 - protein, 15 aa, Artificial Sequence
  Description of Artificial Sequence: Synthetic peptide
  Seed: HIHIFSFTGEEMATK
HIHFFSATVEEFATK

SEQ ID NO: 277856 - protein, 15 aa, Artificial Sequence
  Description of Artificial Sequence: Synthetic peptide
  Seed: HIHIFSFTGEEMATK
HIHFFSATVEEGATK

SEQ ID NO: 277857 - protein, 15 aa, Artificial Sequence
  Description of Artificial Sequence: Synthetic peptide
  Seed: HIHIFSFTGEEMATK
HIHFFSATVEEHATK

SEQ ID NO: 277858 - protein, 15 aa, Artificial Sequence
  Description of Artificial Sequence: Synthetic peptide
  Seed: HIHIFSFTGEEMATK
HIHFFSATVEEIATK

SEQ ID NO: 277859 - protein, 15 aa, Artificial Sequence
  Description of Artificial Sequence: Synthetic peptide
  Seed: HIHIFSFTGEEMATK
HIHFFSATVEELATK

SEQ ID NO: 277860 - protein, 15 aa, Artificial Sequence
  Description of Artificial Sequence: Synthetic peptide
  Seed: HIHIFSFTGEEMATK
HIHFFSATVEEMATK

SEQ ID NO: 277861 - protein, 15 aa, Artificial Sequence
  Description of Artificial Sequence: Synthetic peptide
  Seed: HIHIFSFTGEEMATK
HIHFFSATVEENATK

SEQ ID NO: 277862 - protein, 15 aa, Artificial Sequence
  Description of Artificial Sequence: Synthetic peptide
  Seed: HIHIFSFTGEEMATK
HIHFFSATVEEPATK

SEQ ID NO: 277863 - protein, 15 aa, Artificial Sequence
  Description of Artificial Sequence: Synthetic peptide
  Seed: HIHIFSFTGEEMATK
HIHFFSATVEEQATK

SEQ ID NO: 277864 - protein, 15 aa, Artificial Sequence
  Description of Artificial Sequence: Synthetic peptide
  Seed: HIHIFSFTGEEMATK
HIHFFSATVEESATK

SEQ ID NO: 277865 - protein, 15 aa, Artificial Sequence
  Description of Artificial Sequence: Synthetic peptide
  Seed: HIHIFSFTGEEMATK
HIHFFSATVEETATK

SEQ ID NO: 277866 - protein, 15 aa, Artificial Sequence
  Description of Artificial Sequence: Synthetic peptide
  Seed: HIHIFSFTGEEMATK
HIHFFSATVEEVATK

SEQ ID NO: 277867 - protein, 15 aa, Artificial Sequence
  Description of Artificial Sequence: Synthetic peptide
  Seed: HIHIFSFTGEEMATK
HIHFFSATWEEAATK

SEQ ID NO: 277868 - protein, 15 aa, Artificial Sequence
  Description of Artificial Sequence: Synthetic peptide
  Seed: HIHIFSFTGEEMATK
HIHFFSATWEEFATK

SEQ ID NO: 277869 - protein, 15 aa, Artificial Sequence
  Description of Artificial Sequence: Synthetic peptide
  Seed: HIHIFSFTGEEMATK
HIHFFSATWEEIATK

SEQ ID NO: 277870 - protein, 15 aa, Artificial Sequence
  Description of Artificial Sequence: Synthetic peptide
  Seed: HIHIFSFTGEEMATK
HIHFFSATWEELATK

SEQ ID NO: 277871 - protein, 15 aa, Artificial Sequence
  Description of Artificial Sequence: Synthetic peptide
  Seed: HIHIFSFTGEEMATK
HIHFFSATWEEMATK

SEQ ID NO: 277872 - protein, 15 aa, Artificial Sequence
  Description of Artificial Sequence: Synthetic peptide
  Seed: HIHIFSFTGEEMATK
HIHFFSATWEETATK

SEQ ID NO: 277873 - protein, 15 aa, Artificial Sequence
  Description of Artificial Sequence: Synthetic peptide
  Seed: HIHIFSFTGEEMATK
HIHFFSATWEEVATK

SEQ ID NO: 277874 - protein, 15 aa, Artificial Sequence
  Description of Artificial Sequence: Synthetic peptide
  Seed: HIHIFSFTGEEMATK
HIHFFSATWEEYATK

SEQ ID NO: 277875 - protein, 15 aa, Artificial Sequence
  Description of Artificial Sequence: Synthetic peptide
  Seed: HIHIFSFTGEEMATK
HIHFFSATYEEAATK

SEQ ID NO: 277876 - protein, 15 aa, Artificial Sequence
  Description of Artificial Sequence: Synthetic peptide
  Seed: HIHIFSFTGEEMATK
HIHFFSATYEEEATK

SEQ ID NO: 277877 - protein, 15 aa, Artificial Sequence
  Description of Artificial Sequence: Synthetic peptide
  Seed: HIHIFSFTGEEMATK
HIHFFSATYEEFATK

SEQ ID NO: 277878 - protein, 15 aa, Artificial Sequence
  Description of Artificial Sequence: Synthetic peptide
  Seed: HIHIFSFTGEEMATK
HIHFFSATYEEIATK

SEQ ID NO: 277879 - protein, 15 aa, Artificial Sequence
  Description of Artificial Sequence: Synthetic peptide
  Seed: HIHIFSFTGEEMATK
HIHFFSATYEELATK

SEQ ID NO: 277880 - protein, 15 aa, Artificial Sequence
  Description of Artificial Sequence: Synthetic peptide
  Seed: HIHIFSFTGEEMATK
HIHFFSATYEEMATK

SEQ ID NO: 277881 - protein, 15 aa, Artificial Sequence
  Description of Artificial Sequence: Synthetic peptide
  Seed: HIHIFSFTGEEMATK
HIHFFSATYEESATK

SEQ ID NO: 277882 - protein, 15 aa, Artificial Sequence
  Description of Artificial Sequence: Synthetic peptide
  Seed: HIHIFSFTGEEMATK
HIHFFSATYEETATK

SEQ ID NO: 277883 - protein, 15 aa, Artificial Sequence
  Description of Artificial Sequence: Synthetic peptide
  Seed: HIHIFSFTGEEMATK
HIHFFSATYEEVATK

SEQ ID NO: 277884 - protein, 15 aa, Artificial Sequence
  Description of Artificial Sequence: Synthetic peptide
  Seed: HIHIFSFTGEEMATK
HIHFFSATYEEWATK

SEQ ID NO: 277885 - protein, 15 aa, Artificial Sequence
  Description of Artificial Sequence: Synthetic peptide
  Seed: HIHIFSFTGEEMATK
HIHFFSATYEEYATK

SEQ ID NO: 277886 - protein, 15 aa, Artificial Sequence
  Description of Artificial Sequence: Synthetic peptide
  Seed: HIHIFSFTGEEMATK
HIHFFSCTAEEIATK

SEQ ID NO: 277887 - protein, 15 aa, Artificial Sequence
  Description of Artificial Sequence: Synthetic peptide
  Seed: HIHIFSFTGEEMATK
HIHFFSCTAEELATK

SEQ ID NO: 277888 - protein, 15 aa, Artificial Sequence
  Description of Artificial Sequence: Synthetic peptide
  Seed: HIHIFSFTGEEMATK
HIHFFSCTAEEVATK

SEQ ID NO: 277889 - protein, 15 aa, Artificial Sequence
  Description of Artificial Sequence: Synthetic peptide
  Seed: HIHIFSFTGEEMATK
HIHFFSCTFEEAATK

SEQ ID NO: 277890 - protein, 15 aa, Artificial Sequence
  Description of Artificial Sequence: Synthetic peptide
  Seed: HIHIFSFTGEEMATK
HIHFFSCTFEEEATK

SEQ ID NO: 277891 - protein, 15 aa, Artificial Sequence
  Description of Artificial Sequence: Synthetic peptide
  Seed: HIHIFSFTGEEMATK
HIHFFSCTFEEFATK

SEQ ID NO: 277892 - protein, 15 aa, Artificial Sequence
  Description of Artificial Sequence: Synthetic peptide
  Seed: HIHIFSFTGEEMATK
HIHFFSCTFEEIATK

SEQ ID NO: 277893 - protein, 15 aa, Artificial Sequence
  Description of Artificial Sequence: Synthetic peptide
  Seed: HIHIFSFTGEEMATK
HIHFFSCTFEELATK

SEQ ID NO: 277894 - protein, 15 aa, Artificial Sequence
  Description of Artificial Sequence: Synthetic peptide
  Seed: HIHIFSFTGEEMATK
HIHFFSCTFEEMATK

SEQ ID NO: 277895 - protein, 15 aa, Artificial Sequence
  Description of Artificial Sequence: Synthetic peptide
  Seed: HIHIFSFTGEEMATK
HIHFFSCTFEENATK

SEQ ID NO: 277896 - protein, 15 aa, Artificial Sequence
  Description of Artificial Sequence: Synthetic peptide
  Seed: HIHIFSFTGEEMATK
HIHFFSCTFEESATK

SEQ ID NO: 277897 - protein, 15 aa, Artificial Sequence
  Description of Artificial Sequence: Synthetic peptide
  Seed: HIHIFSFTGEEMATK
HIHFFSCTFEETATK

SEQ ID NO: 277898 - protein, 15 aa, Artificial Sequence
  Description of Artificial Sequence: Synthetic peptide
  Seed: HIHIFSFTGEEMATK
HIHFFSCTFEEVATK

SEQ ID NO: 277899 - protein, 15 aa, Artificial Sequence
  Description of Artificial Sequence: Synthetic peptide
  Seed: HIHIFSFTGEEMATK
HIHFFSCTFEEYATK

SEQ ID NO: 277900 - protein, 15 aa, Artificial Sequence
  Description of Artificial Sequence: Synthetic peptide
  Seed: HIHIFSFTGEEMATK
HIHFFSCTGEELATK

SEQ ID NO: 277901 - protein, 15 aa, Artificial Sequence
  Description of Artificial Sequence: Synthetic peptide
  Seed: HIHIFSFTGEEMATK
HIHFFSCTIEELATK

SEQ ID NO: 277902 - protein, 15 aa, Artificial Sequence
  Description of Artificial Sequence: Synthetic peptide
  Seed: HIHIFSFTGEEMATK
HIHFFSCTLEEFATK

SEQ ID NO: 277903 - protein, 15 aa, Artificial Sequence
  Description of Artificial Sequence: Synthetic peptide
  Seed: HIHIFSFTGEEMATK
HIHFFSCTLEEIATK

SEQ ID NO: 277904 - protein, 15 aa, Artificial Sequence
  Description of Artificial Sequence: Synthetic peptide
  Seed: HIHIFSFTGEEMATK
HIHFFSCTLEELATK

SEQ ID NO: 277905 - protein, 15 aa, Artificial Sequence
  Description of Artificial Sequence: Synthetic peptide
  Seed: HIHIFSFTGEEMATK
HIHFFSCTLEEVATK

SEQ ID NO: 277906 - protein, 15 aa, Artificial Sequence
  Description of Artificial Sequence: Synthetic peptide
  Seed: HIHIFSFTGEEMATK
HIHFFSCTSEELATK

SEQ ID NO: 277907 - protein, 15 aa, Artificial Sequence
  Description of Artificial Sequence: Synthetic peptide
  Seed: HIHIFSFTGEEMATK
HIHFFSCTSEEVATK

SEQ ID NO: 277908 - protein, 15 aa, Artificial Sequence
  Description of Artificial Sequence: Synthetic peptide
  Seed: HIHIFSFTGEEMATK
HIHFFSCTWEEFATK

SEQ ID NO: 277909 - protein, 15 aa, Artificial Sequence
  Description of Artificial Sequence: Synthetic peptide
  Seed: HIHIFSFTGEEMATK
HIHFFSCTWEEIATK

SEQ ID NO: 277910 - protein, 15 aa, Artificial Sequence
  Description of Artificial Sequence: Synthetic peptide
  Seed: HIHIFSFTGEEMATK
HIHFFSCTWEELATK

SEQ ID NO: 277911 - protein, 15 aa, Artificial Sequence
  Description of Artificial Sequence: Synthetic peptide
  Seed: HIHIFSFTGEEMATK
HIHFFSCTYEEFATK

SEQ ID NO: 277912 - protein, 15 aa, Artificial Sequence
  Description of Artificial Sequence: Synthetic peptide
  Seed: HIHIFSFTGEEMATK
HIHFFSCTYEEIATK

SEQ ID NO: 277913 - protein, 15 aa, Artificial Sequence
  Description of Artificial Sequence: Synthetic peptide
  Seed: HIHIFSFTGEEMATK
HIHFFSCTYEELATK

SEQ ID NO: 277914 - protein, 15 aa, Artificial Sequence
  Description of Artificial Sequence: Synthetic peptide
  Seed: HIHIFSFTGEEMATK
HIHFFSCTYEEVATK

SEQ ID NO: 277915 - protein, 15 aa, Artificial Sequence
  Description of Artificial Sequence: Synthetic peptide
  Seed: HIHIFSFTGEEMATK
HIHFFSDTFEEAATK

SEQ ID NO: 277916 - protein, 15 aa, Artificial Sequence
  Description of Artificial Sequence: Synthetic peptide
  Seed: HIHIFSFTGEEMATK
HIHFFSDTFEEFATK

SEQ ID NO: 277917 - protein, 15 aa, Artificial Sequence
  Description of Artificial Sequence: Synthetic peptide
  Seed: HIHIFSFTGEEMATK
HIHFFSDTFEEIATK

SEQ ID NO: 277918 - protein, 15 aa, Artificial Sequence
  Description of Artificial Sequence: Synthetic peptide
  Seed: HIHIFSFTGEEMATK
HIHFFSDTFEELATK

SEQ ID NO: 277919 - protein, 15 aa, Artificial Sequence
  Description of Artificial Sequence: Synthetic peptide
  Seed: HIHIFSFTGEEMATK
HIHFFSDTFEEMATK

SEQ ID NO: 277920 - protein, 15 aa, Artificial Sequence
  Description of Artificial Sequence: Synthetic peptide
  Seed: HIHIFSFTGEEMATK
HIHFFSDTFEESATK

SEQ ID NO: 277921 - protein, 15 aa, Artificial Sequence
  Description of Artificial Sequence: Synthetic peptide
  Seed: HIHIFSFTGEEMATK
HIHFFSDTFEETATK

SEQ ID NO: 277922 - protein, 15 aa, Artificial Sequence
  Description of Artificial Sequence: Synthetic peptide
  Seed: HIHIFSFTGEEMATK
HIHFFSDTFEEVATK

SEQ ID NO: 277923 - protein, 15 aa, Artificial Sequence
  Description of Artificial Sequence: Synthetic peptide
  Seed: HIHIFSFTGEEMATK
HIHFFSDTFEEWATK

SEQ ID NO: 277924 - protein, 15 aa, Artificial Sequence
  Description of Artificial Sequence: Synthetic peptide
  Seed: HIHIFSFTGEEMATK
HIHFFSDTFEEYATK

SEQ ID NO: 277925 - protein, 15 aa, Artificial Sequence
  Description of Artificial Sequence: Synthetic peptide
  Seed: HIHIFSFTGEEMATK
HIHFFSDTIEELATK

SEQ ID NO: 277926 - protein, 15 aa, Artificial Sequence
  Description of Artificial Sequence: Synthetic peptide
  Seed: HIHIFSFTGEEMATK
HIHFFSDTLEEIATK

SEQ ID NO: 277927 - protein, 15 aa, Artificial Sequence
  Description of Artificial Sequence: Synthetic peptide
  Seed: HIHIFSFTGEEMATK
HIHFFSDTLEELATK

SEQ ID NO: 277928 - protein, 15 aa, Artificial Sequence
  Description of Artificial Sequence: Synthetic peptide
  Seed: HIHIFSFTGEEMATK
HIHFFSDTLEEVATK

SEQ ID NO: 277929 - protein, 15 aa, Artificial Sequence
  Description of Artificial Sequence: Synthetic peptide
  Seed: HIHIFSFTGEEMATK
HIHFFSDTMEELATK

SEQ ID NO: 277930 - protein, 15 aa, Artificial Sequence
  Description of Artificial Sequence: Synthetic peptide
  Seed: HIHIFSFTGEEMATK
HIHFFSDTWEEIATK

SEQ ID NO: 277931 - protein, 15 aa, Artificial Sequence
  Description of Artificial Sequence: Synthetic peptide
  Seed: HIHIFSFTGEEMATK
HIHFFSDTWEELATK

SEQ ID NO: 277932 - protein, 15 aa, Artificial Sequence
  Description of Artificial Sequence: Synthetic peptide
  Seed: HIHIFSFTGEEMATK
HIHFFSDTWEEVATK

SEQ ID NO: 277933 - protein, 15 aa, Artificial Sequence
  Description of Artificial Sequence: Synthetic peptide
  Seed: HIHIFSFTGEEMATK
HIHFFSDTYEEFATK

SEQ ID NO: 277934 - protein, 15 aa, Artificial Sequence
  Description of Artificial Sequence: Synthetic peptide
  Seed: HIHIFSFTGEEMATK
HIHFFSDTYEEIATK

SEQ ID NO: 277935 - protein, 15 aa, Artificial Sequence
  Description of Artificial Sequence: Synthetic peptide
  Seed: HIHIFSFTGEEMATK
HIHFFSDTYEELATK

SEQ ID NO: 277936 - protein, 15 aa, Artificial Sequence
  Description of Artificial Sequence: Synthetic peptide
  Seed: HIHIFSFTGEEMATK
HIHFFSDTYEEVATK

SEQ ID NO: 277937 - protein, 15 aa, Artificial Sequence
  Description of Artificial Sequence: Synthetic peptide
  Seed: HIHIFSFTGEEMATK
HIHFFSETAEEAATK

SEQ ID NO: 277938 - protein, 15 aa, Artificial Sequence
  Description of Artificial Sequence: Synthetic peptide
  Seed: HIHIFSFTGEEMATK
HIHFFSETAEEIATK

SEQ ID NO: 277939 - protein, 15 aa, Artificial Sequence
  Description of Artificial Sequence: Synthetic peptide
  Seed: HIHIFSFTGEEMATK
HIHFFSETAEELATK

SEQ ID NO: 277940 - protein, 15 aa, Artificial Sequence
  Description of Artificial Sequence: Synthetic peptide
  Seed: HIHIFSFTGEEMATK
HIHFFSETAEEVATK

SEQ ID NO: 277941 - protein, 15 aa, Artificial Sequence
  Description of Artificial Sequence: Synthetic peptide
  Seed: HIHIFSFTGEEMATK
HIHFFSETFEEAATK

SEQ ID NO: 277942 - protein, 15 aa, Artificial Sequence
  Description of Artificial Sequence: Synthetic peptide
  Seed: HIHIFSFTGEEMATK
HIHFFSETFEECATK

SEQ ID NO: 277943 - protein, 15 aa, Artificial Sequence
  Description of Artificial Sequence: Synthetic peptide
  Seed: HIHIFSFTGEEMATK
HIHFFSETFEEDATK

SEQ ID NO: 277944 - protein, 15 aa, Artificial Sequence
  Description of Artificial Sequence: Synthetic peptide
  Seed: HIHIFSFTGEEMATK
HIHFFSETFEEEATK

SEQ ID NO: 277945 - protein, 15 aa, Artificial Sequence
  Description of Artificial Sequence: Synthetic peptide
  Seed: HIHIFSFTGEEMATK
HIHFFSETFEEFATK

SEQ ID NO: 277946 - protein, 15 aa, Artificial Sequence
  Description of Artificial Sequence: Synthetic peptide
  Seed: HIHIFSFTGEEMATK
HIHFFSETFEEGATK

SEQ ID NO: 277947 - protein, 15 aa, Artificial Sequence
  Description of Artificial Sequence: Synthetic peptide
  Seed: HIHIFSFTGEEMATK
HIHFFSETFEEHATK

SEQ ID NO: 277948 - protein, 15 aa, Artificial Sequence
  Description of Artificial Sequence: Synthetic peptide
  Seed: HIHIFSFTGEEMATK
HIHFFSETFEEIATK

SEQ ID NO: 277949 - protein, 15 aa, Artificial Sequence
  Description of Artificial Sequence: Synthetic peptide
  Seed: HIHIFSFTGEEMATK
HIHFFSETFEELATK

SEQ ID NO: 277950 - protein, 15 aa, Artificial Sequence
  Description of Artificial Sequence: Synthetic peptide
  Seed: HIHIFSFTGEEMATK
HIHFFSETFEEMATK

SEQ ID NO: 277951 - protein, 15 aa, Artificial Sequence
  Description of Artificial Sequence: Synthetic peptide
  Seed: HIHIFSFTGEEMATK
HIHFFSETFEENATK

SEQ ID NO: 277952 - protein, 15 aa, Artificial Sequence
  Description of Artificial Sequence: Synthetic peptide
  Seed: HIHIFSFTGEEMATK
HIHFFSETFEEPATK

SEQ ID NO: 277953 - protein, 15 aa, Artificial Sequence
  Description of Artificial Sequence: Synthetic peptide
  Seed: HIHIFSFTGEEMATK
HIHFFSETFEEQATK

SEQ ID NO: 277954 - protein, 15 aa, Artificial Sequence
  Description of Artificial Sequence: Synthetic peptide
  Seed: HIHIFSFTGEEMATK
HIHFFSETFEERATK

SEQ ID NO: 277955 - protein, 15 aa, Artificial Sequence
  Description of Artificial Sequence: Synthetic peptide
  Seed: HIHIFSFTGEEMATK
HIHFFSETFEESATK

SEQ ID NO: 277956 - protein, 15 aa, Artificial Sequence
  Description of Artificial Sequence: Synthetic peptide
  Seed: HIHIFSFTGEEMATK
HIHFFSETFEETATK

SEQ ID NO: 277957 - protein, 15 aa, Artificial Sequence
  Description of Artificial Sequence: Synthetic peptide
  Seed: HIHIFSFTGEEMATK
HIHFFSETFEEVATK

SEQ ID NO: 277958 - protein, 15 aa, Artificial Sequence
  Description of Artificial Sequence: Synthetic peptide
  Seed: HIHIFSFTGEEMATK
HIHFFSETFEEWATK

SEQ ID NO: 277959 - protein, 15 aa, Artificial Sequence
  Description of Artificial Sequence: Synthetic peptide
  Seed: HIHIFSFTGEEMATK
HIHFFSETFEEYATK

SEQ ID NO: 277960 - protein, 15 aa, Artificial Sequence
  Description of Artificial Sequence: Synthetic peptide
  Seed: HIHIFSFTGEEMATK
HIHFFSETGEEAATK

SEQ ID NO: 277961 - protein, 15 aa, Artificial Sequence
  Description of Artificial Sequence: Synthetic peptide
  Seed: HIHIFSFTGEEMATK
HIHFFSETGEEIATK

SEQ ID NO: 277962 - protein, 15 aa, Artificial Sequence
  Description of Artificial Sequence: Synthetic peptide
  Seed: HIHIFSFTGEEMATK
HIHFFSETGEELATK

SEQ ID NO: 277963 - protein, 15 aa, Artificial Sequence
  Description of Artificial Sequence: Synthetic peptide
  Seed: HIHIFSFTGEEMATK
HIHFFSETGEEVATK

SEQ ID NO: 277964 - protein, 15 aa, Artificial Sequence
  Description of Artificial Sequence: Synthetic peptide
  Seed: HIHIFSFTGEEMATK
HIHFFSETIEEFATK

SEQ ID NO: 277965 - protein, 15 aa, Artificial Sequence
  Description of Artificial Sequence: Synthetic peptide
  Seed: HIHIFSFTGEEMATK
HIHFFSETIEEIATK

SEQ ID NO: 277966 - protein, 15 aa, Artificial Sequence
  Description of Artificial Sequence: Synthetic peptide
  Seed: HIHIFSFTGEEMATK
HIHFFSETIEELATK

SEQ ID NO: 277967 - protein, 15 aa, Artificial Sequence
  Description of Artificial Sequence: Synthetic peptide
  Seed: HIHIFSFTGEEMATK
HIHFFSETIEEMATK

SEQ ID NO: 277968 - protein, 15 aa, Artificial Sequence
  Description of Artificial Sequence: Synthetic peptide
  Seed: HIHIFSFTGEEMATK
HIHFFSETIEEVATK

SEQ ID NO: 277969 - protein, 15 aa, Artificial Sequence
  Description of Artificial Sequence: Synthetic peptide
  Seed: HIHIFSFTGEEMATK
HIHFFSETLEEFATK

SEQ ID NO: 277970 - protein, 15 aa, Artificial Sequence
  Description of Artificial Sequence: Synthetic peptide
  Seed: HIHIFSFTGEEMATK
HIHFFSETLEEIATK

SEQ ID NO: 277971 - protein, 15 aa, Artificial Sequence
  Description of Artificial Sequence: Synthetic peptide
  Seed: HIHIFSFTGEEMATK
HIHFFSETLEELATK

SEQ ID NO: 277972 - protein, 15 aa, Artificial Sequence
  Description of Artificial Sequence: Synthetic peptide
  Seed: HIHIFSFTGEEMATK
HIHFFSETLEEMATK

SEQ ID NO: 277973 - protein, 15 aa, Artificial Sequence
  Description of Artificial Sequence: Synthetic peptide
  Seed: HIHIFSFTGEEMATK
HIHFFSETLEEVATK

SEQ ID NO: 277974 - protein, 15 aa, Artificial Sequence
  Description of Artificial Sequence: Synthetic peptide
  Seed: HIHIFSFTGEEMATK
HIHFFSETLEEYATK

SEQ ID NO: 277975 - protein, 15 aa, Artificial Sequence
  Description of Artificial Sequence: Synthetic peptide
  Seed: HIHIFSFTGEEMATK
HIHFFSETMEEFATK

SEQ ID NO: 277976 - protein, 15 aa, Artificial Sequence
  Description of Artificial Sequence: Synthetic peptide
  Seed: HIHIFSFTGEEMATK
HIHFFSETMEEIATK

SEQ ID NO: 277977 - protein, 15 aa, Artificial Sequence
  Description of Artificial Sequence: Synthetic peptide
  Seed: HIHIFSFTGEEMATK
HIHFFSETMEELATK

SEQ ID NO: 277978 - protein, 15 aa, Artificial Sequence
  Description of Artificial Sequence: Synthetic peptide
  Seed: HIHIFSFTGEEMATK
HIHFFSETMEEMATK

SEQ ID NO: 277979 - protein, 15 aa, Artificial Sequence
  Description of Artificial Sequence: Synthetic peptide
  Seed: HIHIFSFTGEEMATK
HIHFFSETMEEVATK

SEQ ID NO: 277980 - protein, 15 aa, Artificial Sequence
  Description of Artificial Sequence: Synthetic peptide
  Seed: HIHIFSFTGEEMATK
HIHFFSETSEEAATK

SEQ ID NO: 277981 - protein, 15 aa, Artificial Sequence
  Description of Artificial Sequence: Synthetic peptide
  Seed: HIHIFSFTGEEMATK
HIHFFSETSEEIATK

SEQ ID NO: 277982 - protein, 15 aa, Artificial Sequence
  Description of Artificial Sequence: Synthetic peptide
  Seed: HIHIFSFTGEEMATK
HIHFFSETSEELATK

SEQ ID NO: 277983 - protein, 15 aa, Artificial Sequence
  Description of Artificial Sequence: Synthetic peptide
  Seed: HIHIFSFTGEEMATK
HIHFFSETSEEVATK

SEQ ID NO: 277984 - protein, 15 aa, Artificial Sequence
  Description of Artificial Sequence: Synthetic peptide
  Seed: HIHIFSFTGEEMATK
HIHFFSETVEEFATK

SEQ ID NO: 277985 - protein, 15 aa, Artificial Sequence
  Description of Artificial Sequence: Synthetic peptide
  Seed: HIHIFSFTGEEMATK
HIHFFSETVEEIATK

SEQ ID NO: 277986 - protein, 15 aa, Artificial Sequence
  Description of Artificial Sequence: Synthetic peptide
  Seed: HIHIFSFTGEEMATK
HIHFFSETVEELATK

SEQ ID NO: 277987 - protein, 15 aa, Artificial Sequence
  Description of Artificial Sequence: Synthetic peptide
  Seed: HIHIFSFTGEEMATK
HIHFFSETVEEVATK

SEQ ID NO: 277988 - protein, 15 aa, Artificial Sequence
  Description of Artificial Sequence: Synthetic peptide
  Seed: HIHIFSFTGEEMATK
HIHFFSETWEEFATK

SEQ ID NO: 277989 - protein, 15 aa, Artificial Sequence
  Description of Artificial Sequence: Synthetic peptide
  Seed: HIHIFSFTGEEMATK
HIHFFSETWEEIATK

SEQ ID NO: 277990 - protein, 15 aa, Artificial Sequence
  Description of Artificial Sequence: Synthetic peptide
  Seed: HIHIFSFTGEEMATK
HIHFFSETWEELATK

SEQ ID NO: 277991 - protein, 15 aa, Artificial Sequence
  Description of Artificial Sequence: Synthetic peptide
  Seed: HIHIFSFTGEEMATK
HIHFFSETWEEMATK

SEQ ID NO: 277992 - protein, 15 aa, Artificial Sequence
  Description of Artificial Sequence: Synthetic peptide
  Seed: HIHIFSFTGEEMATK
HIHFFSETWEEVATK

SEQ ID NO: 277993 - protein, 15 aa, Artificial Sequence
  Description of Artificial Sequence: Synthetic peptide
  Seed: HIHIFSFTGEEMATK
HIHFFSETYEEFATK

SEQ ID NO: 277994 - protein, 15 aa, Artificial Sequence
  Description of Artificial Sequence: Synthetic peptide
  Seed: HIHIFSFTGEEMATK
HIHFFSETYEEIATK

SEQ ID NO: 277995 - protein, 15 aa, Artificial Sequence
  Description of Artificial Sequence: Synthetic peptide
  Seed: HIHIFSFTGEEMATK
HIHFFSETYEELATK

SEQ ID NO: 277996 - protein, 15 aa, Artificial Sequence
  Description of Artificial Sequence: Synthetic peptide
  Seed: HIHIFSFTGEEMATK
HIHFFSETYEEMATK

SEQ ID NO: 277997 - protein, 15 aa, Artificial Sequence
  Description of Artificial Sequence: Synthetic peptide
  Seed: HIHIFSFTGEEMATK
HIHFFSETYEEVATK

SEQ ID NO: 277998 - protein, 15 aa, Artificial Sequence
  Description of Artificial Sequence: Synthetic peptide
  Seed: HIHIFSFTGEEMATK
HIHFFSETYEEWATK

SEQ ID NO: 277999 - protein, 15 aa, Artificial Sequence
  Description of Artificial Sequence: Synthetic peptide
  Seed: HIHIFSFTGEEMATK
HIHFFSETYEEYATK

SEQ ID NO: 278000 - protein, 15 aa, Artificial Sequence
  Description of Artificial Sequence: Synthetic peptide
  Seed: HIHIFSFTGEEMATK
HIHFFSFTAEEAATK

SEQ ID NO: 278001 - protein, 15 aa, Artificial Sequence
  Description of Artificial Sequence: Synthetic peptide
  Seed: HIHIFSFTGEEMATK
HIHFFSFTAEEFATK

SEQ ID NO: 278002 - protein, 15 aa, Artificial Sequence
  Description of Artificial Sequence: Synthetic peptide
  Seed: HIHIFSFTGEEMATK
HIHFFSFTAEEGATK

SEQ ID NO: 278003 - protein, 15 aa, Artificial Sequence
  Description of Artificial Sequence: Synthetic peptide
  Seed: HIHIFSFTGEEMATK
HIHFFSFTAEEHATK

SEQ ID NO: 278004 - protein, 15 aa, Artificial Sequence
  Description of Artificial Sequence: Synthetic peptide
  Seed: HIHIFSFTGEEMATK
HIHFFSFTAEEIATK

SEQ ID NO: 278005 - protein, 15 aa, Artificial Sequence
  Description of Artificial Sequence: Synthetic peptide
  Seed: HIHIFSFTGEEMATK
HIHFFSFTAEEMATK

SEQ ID NO: 278006 - protein, 15 aa, Artificial Sequence
  Description of Artificial Sequence: Synthetic peptide
  Seed: HIHIFSFTGEEMATK
HIHFFSFTAEENATK

SEQ ID NO: 278007 - protein, 15 aa, Artificial Sequence
  Description of Artificial Sequence: Synthetic peptide
  Seed: HIHIFSFTGEEMATK
HIHFFSFTAEEPATK

SEQ ID NO: 278008 - protein, 15 aa, Artificial Sequence
  Description of Artificial Sequence: Synthetic peptide
  Seed: HIHIFSFTGEEMATK
HIHFFSFTAEEQATK

SEQ ID NO: 278009 - protein, 15 aa, Artificial Sequence
  Description of Artificial Sequence: Synthetic peptide
  Seed: HIHIFSFTGEEMATK
HIHFFSFTAEESATK

SEQ ID NO: 278010 - protein, 15 aa, Artificial Sequence
  Description of Artificial Sequence: Synthetic peptide
  Seed: HIHIFSFTGEEMATK
HIHFFSFTAEETATK

SEQ ID NO: 278011 - protein, 15 aa, Artificial Sequence
  Description of Artificial Sequence: Synthetic peptide
  Seed: HIHIFSFTGEEMATK
HIHFFSFTAEEVATK

SEQ ID NO: 278012 - protein, 15 aa, Artificial Sequence
  Description of Artificial Sequence: Synthetic peptide
  Seed: HIHIFSFTGEEMATK
HIHFFSFTAEEYATK

SEQ ID NO: 278013 - protein, 15 aa, Artificial Sequence
  Description of Artificial Sequence: Synthetic peptide
  Seed: HIHIFSFTGEEMATK
HIHFFSFTFEEAATK

SEQ ID NO: 278014 - protein, 15 aa, Artificial Sequence
  Description of Artificial Sequence: Synthetic peptide
  Seed: HIHIFSFTGEEMATK
HIHFFSFTFEECATK

SEQ ID NO: 278015 - protein, 15 aa, Artificial Sequence
  Description of Artificial Sequence: Synthetic peptide
  Seed: HIHIFSFTGEEMATK
HIHFFSFTFEEDATK

SEQ ID NO: 278016 - protein, 15 aa, Artificial Sequence
  Description of Artificial Sequence: Synthetic peptide
  Seed: HIHIFSFTGEEMATK
HIHFFSFTFEEEATK

SEQ ID NO: 278017 - protein, 15 aa, Artificial Sequence
  Description of Artificial Sequence: Synthetic peptide
  Seed: HIHIFSFTGEEMATK
HIHFFSFTFEEFATK

SEQ ID NO: 278018 - protein, 15 aa, Artificial Sequence
  Description of Artificial Sequence: Synthetic peptide
  Seed: HIHIFSFTGEEMATK
HIHFFSFTFEEGATK

SEQ ID NO: 278019 - protein, 15 aa, Artificial Sequence
  Description of Artificial Sequence: Synthetic peptide
  Seed: HIHIFSFTGEEMATK
HIHFFSFTFEEHATK

SEQ ID NO: 278020 - protein, 15 aa, Artificial Sequence
  Description of Artificial Sequence: Synthetic peptide
  Seed: HIHIFSFTGEEMATK
HIHFFSFTFEEIATK

SEQ ID NO: 278021 - protein, 15 aa, Artificial Sequence
  Description of Artificial Sequence: Synthetic peptide
  Seed: HIHIFSFTGEEMATK
HIHFFSFTFEEKATK

SEQ ID NO: 278022 - protein, 15 aa, Artificial Sequence
  Description of Artificial Sequence: Synthetic peptide
  Seed: HIHIFSFTGEEMATK
HIHFFSFTFEELATK

SEQ ID NO: 278023 - protein, 15 aa, Artificial Sequence
  Description of Artificial Sequence: Synthetic peptide
  Seed: HIHIFSFTGEEMATK
HIHFFSFTFEEMATK

SEQ ID NO: 278024 - protein, 15 aa, Artificial Sequence
  Description of Artificial Sequence: Synthetic peptide
  Seed: HIHIFSFTGEEMATK
HIHFFSFTFEENATK

SEQ ID NO: 278025 - protein, 15 aa, Artificial Sequence
  Description of Artificial Sequence: Synthetic peptide
  Seed: HIHIFSFTGEEMATK
HIHFFSFTFEEPATK

SEQ ID NO: 278026 - protein, 15 aa, Artificial Sequence
  Description of Artificial Sequence: Synthetic peptide
  Seed: HIHIFSFTGEEMATK
HIHFFSFTFEEQATK

SEQ ID NO: 278027 - protein, 15 aa, Artificial Sequence
  Description of Artificial Sequence: Synthetic peptide
  Seed: HIHIFSFTGEEMATK
HIHFFSFTFEERATK

SEQ ID NO: 278028 - protein, 15 aa, Artificial Sequence
  Description of Artificial Sequence: Synthetic peptide
  Seed: HIHIFSFTGEEMATK
HIHFFSFTFEESATK

SEQ ID NO: 278029 - protein, 15 aa, Artificial Sequence
  Description of Artificial Sequence: Synthetic peptide
  Seed: HIHIFSFTGEEMATK
HIHFFSFTFEETATK

SEQ ID NO: 278030 - protein, 15 aa, Artificial Sequence
  Description of Artificial Sequence: Synthetic peptide
  Seed: HIHIFSFTGEEMATK
HIHFFSFTFEEVATK

SEQ ID NO: 278031 - protein, 15 aa, Artificial Sequence
  Description of Artificial Sequence: Synthetic peptide
  Seed: HIHIFSFTGEEMATK
HIHFFSFTFEEWATK

SEQ ID NO: 278032 - protein, 15 aa, Artificial Sequence
  Description of Artificial Sequence: Synthetic peptide
  Seed: HIHIFSFTGEEMATK
HIHFFSFTFEEYATK

SEQ ID NO: 278033 - protein, 15 aa, Artificial Sequence
  Description of Artificial Sequence: Synthetic peptide
  Seed: HIHIFSFTGEEMATK
HIHFFSFTGEEAATK

SEQ ID NO: 278034 - protein, 15 aa, Artificial Sequence
  Description of Artificial Sequence: Synthetic peptide
  Seed: HIHIFSFTGEEMATK
HIHFFSFTGEEIATK

SEQ ID NO: 278035 - protein, 15 aa, Artificial Sequence
  Description of Artificial Sequence: Synthetic peptide
  Seed: HIHIFSFTGEEMATK
HIHFFSFTGEELATK

SEQ ID NO: 278036 - protein, 15 aa, Artificial Sequence
  Description of Artificial Sequence: Synthetic peptide
  Seed: HIHIFSFTGEEMATK
HIHFFSFTGEEMATK

SEQ ID NO: 278037 - protein, 15 aa, Artificial Sequence
  Description of Artificial Sequence: Synthetic peptide
  Seed: HIHIFSFTGEEMATK
HIHFFSFTGEESATK

SEQ ID NO: 278038 - protein, 15 aa, Artificial Sequence
  Description of Artificial Sequence: Synthetic peptide
  Seed: HIHIFSFTGEEMATK
HIHFFSFTGEEVATK

SEQ ID NO: 278039 - protein, 15 aa, Artificial Sequence
  Description of Artificial Sequence: Synthetic peptide
  Seed: HIHIFSFTGEEMATK
HIHFFSFTHEEFATK

SEQ ID NO: 278040 - protein, 15 aa, Artificial Sequence
  Description of Artificial Sequence: Synthetic peptide
  Seed: HIHIFSFTGEEMATK
HIHFFSFTHEEIATK

SEQ ID NO: 278041 - protein, 15 aa, Artificial Sequence
  Description of Artificial Sequence: Synthetic peptide
  Seed: HIHIFSFTGEEMATK
HIHFFSFTHEELATK

SEQ ID NO: 278042 - protein, 15 aa, Artificial Sequence
  Description of Artificial Sequence: Synthetic peptide
  Seed: HIHIFSFTGEEMATK
HIHFFSFTHEEVATK

SEQ ID NO: 278043 - protein, 15 aa, Artificial Sequence
  Description of Artificial Sequence: Synthetic peptide
  Seed: HIHIFSFTGEEMATK
HIHFFSFTIEEAATK

SEQ ID NO: 278044 - protein, 15 aa, Artificial Sequence
  Description of Artificial Sequence: Synthetic peptide
  Seed: HIHIFSFTGEEMATK
HIHFFSFTIEEEATK

SEQ ID NO: 278045 - protein, 15 aa, Artificial Sequence
  Description of Artificial Sequence: Synthetic peptide
  Seed: HIHIFSFTGEEMATK
HIHFFSFTIEEFATK

SEQ ID NO: 278046 - protein, 15 aa, Artificial Sequence
  Description of Artificial Sequence: Synthetic peptide
  Seed: HIHIFSFTGEEMATK
HIHFFSFTIEEHATK

SEQ ID NO: 278047 - protein, 15 aa, Artificial Sequence
  Description of Artificial Sequence: Synthetic peptide
  Seed: HIHIFSFTGEEMATK
HIHFFSFTIEEIATK

SEQ ID NO: 278048 - protein, 15 aa, Artificial Sequence
  Description of Artificial Sequence: Synthetic peptide
  Seed: HIHIFSFTGEEMATK
HIHFFSFTIEELATK

SEQ ID NO: 278049 - protein, 15 aa, Artificial Sequence
  Description of Artificial Sequence: Synthetic peptide
  Seed: HIHIFSFTGEEMATK
HIHFFSFTIEEMATK

SEQ ID NO: 278050 - protein, 15 aa, Artificial Sequence
  Description of Artificial Sequence: Synthetic peptide
  Seed: HIHIFSFTGEEMATK
HIHFFSFTIEENATK

SEQ ID NO: 278051 - protein, 15 aa, Artificial Sequence
  Description of Artificial Sequence: Synthetic peptide
  Seed: HIHIFSFTGEEMATK
HIHFFSFTIEEPATK

SEQ ID NO: 278052 - protein, 15 aa, Artificial Sequence
  Description of Artificial Sequence: Synthetic peptide
  Seed: HIHIFSFTGEEMATK
HIHFFSFTIEERATK

SEQ ID NO: 278053 - protein, 15 aa, Artificial Sequence
  Description of Artificial Sequence: Synthetic peptide
  Seed: HIHIFSFTGEEMATK
HIHFFSFTIEESATK

SEQ ID NO: 278054 - protein, 15 aa, Artificial Sequence
  Description of Artificial Sequence: Synthetic peptide
  Seed: HIHIFSFTGEEMATK
HIHFFSFTIEETATK

SEQ ID NO: 278055 - protein, 15 aa, Artificial Sequence
  Description of Artificial Sequence: Synthetic peptide
  Seed: HIHIFSFTGEEMATK
HIHFFSFTIEEVATK

SEQ ID NO: 278056 - protein, 15 aa, Artificial Sequence
  Description of Artificial Sequence: Synthetic peptide
  Seed: HIHIFSFTGEEMATK
HIHFFSFTIEEYATK

SEQ ID NO: 278057 - protein, 15 aa, Artificial Sequence
  Description of Artificial Sequence: Synthetic peptide
  Seed: HIHIFSFTGEEMATK
HIHFFSFTLEEAATK

SEQ ID NO: 278058 - protein, 15 aa, Artificial Sequence
  Description of Artificial Sequence: Synthetic peptide
  Seed: HIHIFSFTGEEMATK
HIHFFSFTLEEDATK

SEQ ID NO: 278059 - protein, 15 aa, Artificial Sequence
  Description of Artificial Sequence: Synthetic peptide
  Seed: HIHIFSFTGEEMATK
HIHFFSFTLEEEATK

SEQ ID NO: 278060 - protein, 15 aa, Artificial Sequence
  Description of Artificial Sequence: Synthetic peptide
  Seed: HIHIFSFTGEEMATK
HIHFFSFTLEEFATK

SEQ ID NO: 278061 - protein, 15 aa, Artificial Sequence
  Description of Artificial Sequence: Synthetic peptide
  Seed: HIHIFSFTGEEMATK
HIHFFSFTLEEHATK

SEQ ID NO: 278062 - protein, 15 aa, Artificial Sequence
  Description of Artificial Sequence: Synthetic peptide
  Seed: HIHIFSFTGEEMATK
HIHFFSFTLEEIATK

SEQ ID NO: 278063 - protein, 15 aa, Artificial Sequence
  Description of Artificial Sequence: Synthetic peptide
  Seed: HIHIFSFTGEEMATK
HIHFFSFTLEEKATK

SEQ ID NO: 278064 - protein, 15 aa, Artificial Sequence
  Description of Artificial Sequence: Synthetic peptide
  Seed: HIHIFSFTGEEMATK
HIHFFSFTLEELATK

SEQ ID NO: 278065 - protein, 15 aa, Artificial Sequence
  Description of Artificial Sequence: Synthetic peptide
  Seed: HIHIFSFTGEEMATK
HIHFFSFTLEEMATK

SEQ ID NO: 278066 - protein, 15 aa, Artificial Sequence
  Description of Artificial Sequence: Synthetic peptide
  Seed: HIHIFSFTGEEMATK
HIHFFSFTLEENATK

SEQ ID NO: 278067 - protein, 15 aa, Artificial Sequence
  Description of Artificial Sequence: Synthetic peptide
  Seed: HIHIFSFTGEEMATK
HIHFFSFTLEEPATK

SEQ ID NO: 278068 - protein, 15 aa, Artificial Sequence
  Description of Artificial Sequence: Synthetic peptide
  Seed: HIHIFSFTGEEMATK
HIHFFSFTLEEQATK

SEQ ID NO: 278069 - protein, 15 aa, Artificial Sequence
  Description of Artificial Sequence: Synthetic peptide
  Seed: HIHIFSFTGEEMATK
HIHFFSFTLEERATK

SEQ ID NO: 278070 - protein, 15 aa, Artificial Sequence
  Description of Artificial Sequence: Synthetic peptide
  Seed: HIHIFSFTGEEMATK
HIHFFSFTLEESATK

SEQ ID NO: 278071 - protein, 15 aa, Artificial Sequence
  Description of Artificial Sequence: Synthetic peptide
  Seed: HIHIFSFTGEEMATK
HIHFFSFTLEETATK

SEQ ID NO: 278072 - protein, 15 aa, Artificial Sequence
  Description of Artificial Sequence: Synthetic peptide
  Seed: HIHIFSFTGEEMATK
HIHFFSFTLEEVATK

SEQ ID NO: 278073 - protein, 15 aa, Artificial Sequence
  Description of Artificial Sequence: Synthetic peptide
  Seed: HIHIFSFTGEEMATK
HIHFFSFTLEEWATK

SEQ ID NO: 278074 - protein, 15 aa, Artificial Sequence
  Description of Artificial Sequence: Synthetic peptide
  Seed: HIHIFSFTGEEMATK
HIHFFSFTLEEYATK

SEQ ID NO: 278075 - protein, 15 aa, Artificial Sequence
  Description of Artificial Sequence: Synthetic peptide
  Seed: HIHIFSFTGEEMATK
HIHFFSFTMEEAATK

SEQ ID NO: 278076 - protein, 15 aa, Artificial Sequence
  Description of Artificial Sequence: Synthetic peptide
  Seed: HIHIFSFTGEEMATK
HIHFFSFTMEEEATK

SEQ ID NO: 278077 - protein, 15 aa, Artificial Sequence
  Description of Artificial Sequence: Synthetic peptide
  Seed: HIHIFSFTGEEMATK
HIHFFSFTMEEFATK

SEQ ID NO: 278078 - protein, 15 aa, Artificial Sequence
  Description of Artificial Sequence: Synthetic peptide
  Seed: HIHIFSFTGEEMATK
HIHFFSFTMEEHATK

SEQ ID NO: 278079 - protein, 15 aa, Artificial Sequence
  Description of Artificial Sequence: Synthetic peptide
  Seed: HIHIFSFTGEEMATK
HIHFFSFTMEEIATK

SEQ ID NO: 278080 - protein, 15 aa, Artificial Sequence
  Description of Artificial Sequence: Synthetic peptide
  Seed: HIHIFSFTGEEMATK
HIHFFSFTMEEKATK

SEQ ID NO: 278081 - protein, 15 aa, Artificial Sequence
  Description of Artificial Sequence: Synthetic peptide
  Seed: HIHIFSFTGEEMATK
HIHFFSFTMEELATK

SEQ ID NO: 278082 - protein, 15 aa, Artificial Sequence
  Description of Artificial Sequence: Synthetic peptide
  Seed: HIHIFSFTGEEMATK
HIHFFSFTMEEMATK

SEQ ID NO: 278083 - protein, 15 aa, Artificial Sequence
  Description of Artificial Sequence: Synthetic peptide
  Seed: HIHIFSFTGEEMATK
HIHFFSFTMEENATK

SEQ ID NO: 278084 - protein, 15 aa, Artificial Sequence
  Description of Artificial Sequence: Synthetic peptide
  Seed: HIHIFSFTGEEMATK
HIHFFSFTMEEPATK

SEQ ID NO: 278085 - protein, 15 aa, Artificial Sequence
  Description of Artificial Sequence: Synthetic peptide
  Seed: HIHIFSFTGEEMATK
HIHFFSFTMEERATK

SEQ ID NO: 278086 - protein, 15 aa, Artificial Sequence
  Description of Artificial Sequence: Synthetic peptide
  Seed: HIHIFSFTGEEMATK
HIHFFSFTMEESATK

SEQ ID NO: 278087 - protein, 15 aa, Artificial Sequence
  Description of Artificial Sequence: Synthetic peptide
  Seed: HIHIFSFTGEEMATK
HIHFFSFTMEETATK

SEQ ID NO: 278088 - protein, 15 aa, Artificial Sequence
  Description of Artificial Sequence: Synthetic peptide
  Seed: HIHIFSFTGEEMATK
HIHFFSFTMEEVATK

SEQ ID NO: 278089 - protein, 15 aa, Artificial Sequence
  Description of Artificial Sequence: Synthetic peptide
  Seed: HIHIFSFTGEEMATK
HIHFFSFTMEEYATK

SEQ ID NO: 278090 - protein, 15 aa, Artificial Sequence
  Description of Artificial Sequence: Synthetic peptide
  Seed: HIHIFSFTGEEMATK
HIHFFSFTNEEAATK

SEQ ID NO: 278091 - protein, 15 aa, Artificial Sequence
  Description of Artificial Sequence: Synthetic peptide
  Seed: HIHIFSFTGEEMATK
HIHFFSFTNEEDATK

SEQ ID NO: 278092 - protein, 15 aa, Artificial Sequence
  Description of Artificial Sequence: Synthetic peptide
  Seed: HIHIFSFTGEEMATK
HIHFFSFTNEEEATK

SEQ ID NO: 278093 - protein, 15 aa, Artificial Sequence
  Description of Artificial Sequence: Synthetic peptide
  Seed: HIHIFSFTGEEMATK
HIHFFSFTNEEIATK

SEQ ID NO: 278094 - protein, 15 aa, Artificial Sequence
  Description of Artificial Sequence: Synthetic peptide
  Seed: HIHIFSFTGEEMATK
HIHFFSFTNEEVATK

SEQ ID NO: 278095 - protein, 15 aa, Artificial Sequence
  Description of Artificial Sequence: Synthetic peptide
  Seed: HIHIFSFTGEEMATK
HIHFFSFTPEEAATK

SEQ ID NO: 278096 - protein, 15 aa, Artificial Sequence
  Description of Artificial Sequence: Synthetic peptide
  Seed: HIHIFSFTGEEMATK
HIHFFSFTPEEFATK

SEQ ID NO: 278097 - protein, 15 aa, Artificial Sequence
  Description of Artificial Sequence: Synthetic peptide
  Seed: HIHIFSFTGEEMATK
HIHFFSFTPEEGATK

SEQ ID NO: 278098 - protein, 15 aa, Artificial Sequence
  Description of Artificial Sequence: Synthetic peptide
  Seed: HIHIFSFTGEEMATK
HIHFFSFTPEEHATK

SEQ ID NO: 278099 - protein, 15 aa, Artificial Sequence
  Description of Artificial Sequence: Synthetic peptide
  Seed: HIHIFSFTGEEMATK
HIHFFSFTPEEIATK

SEQ ID NO: 278100 - protein, 15 aa, Artificial Sequence
  Description of Artificial Sequence: Synthetic peptide
  Seed: HIHIFSFTGEEMATK
HIHFFSFTPEELATK

SEQ ID NO: 278101 - protein, 15 aa, Artificial Sequence
  Description of Artificial Sequence: Synthetic peptide
  Seed: HIHIFSFTGEEMATK
HIHFFSFTPEEMATK

SEQ ID NO: 278102 - protein, 15 aa, Artificial Sequence
  Description of Artificial Sequence: Synthetic peptide
  Seed: HIHIFSFTGEEMATK
HIHFFSFTPEENATK

SEQ ID NO: 278103 - protein, 15 aa, Artificial Sequence
  Description of Artificial Sequence: Synthetic peptide
  Seed: HIHIFSFTGEEMATK
HIHFFSFTPEESATK

SEQ ID NO: 278104 - protein, 15 aa, Artificial Sequence
  Description of Artificial Sequence: Synthetic peptide
  Seed: HIHIFSFTGEEMATK
HIHFFSFTPEETATK

SEQ ID NO: 278105 - protein, 15 aa, Artificial Sequence
  Description of Artificial Sequence: Synthetic peptide
  Seed: HIHIFSFTGEEMATK
HIHFFSFTPEEVATK

SEQ ID NO: 278106 - protein, 15 aa, Artificial Sequence
  Description of Artificial Sequence: Synthetic peptide
  Seed: HIHIFSFTGEEMATK
HIHFFSFTQEEFATK

SEQ ID NO: 278107 - protein, 15 aa, Artificial Sequence
  Description of Artificial Sequence: Synthetic peptide
  Seed: HIHIFSFTGEEMATK
HIHFFSFTQEEIATK

SEQ ID NO: 278108 - protein, 15 aa, Artificial Sequence
  Description of Artificial Sequence: Synthetic peptide
  Seed: HIHIFSFTGEEMATK
HIHFFSFTQEELATK

SEQ ID NO: 278109 - protein, 15 aa, Artificial Sequence
  Description of Artificial Sequence: Synthetic peptide
  Seed: HIHIFSFTGEEMATK
HIHFFSFTREELATK

SEQ ID NO: 278110 - protein, 15 aa, Artificial Sequence
  Description of Artificial Sequence: Synthetic peptide
  Seed: HIHIFSFTGEEMATK
HIHFFSFTSEEAATK

SEQ ID NO: 278111 - protein, 15 aa, Artificial Sequence
  Description of Artificial Sequence: Synthetic peptide
  Seed: HIHIFSFTGEEMATK
HIHFFSFTSEEFATK

SEQ ID NO: 278112 - protein, 15 aa, Artificial Sequence
  Description of Artificial Sequence: Synthetic peptide
  Seed: HIHIFSFTGEEMATK
HIHFFSFTSEEGATK

SEQ ID NO: 278113 - protein, 15 aa, Artificial Sequence
  Description of Artificial Sequence: Synthetic peptide
  Seed: HIHIFSFTGEEMATK
HIHFFSFTSEEMATK

SEQ ID NO: 278114 - protein, 15 aa, Artificial Sequence
  Description of Artificial Sequence: Synthetic peptide
  Seed: HIHIFSFTGEEMATK
HIHFFSFTSEENATK

SEQ ID NO: 278115 - protein, 15 aa, Artificial Sequence
  Description of Artificial Sequence: Synthetic peptide
  Seed: HIHIFSFTGEEMATK
HIHFFSFTSEESATK

SEQ ID NO: 278116 - protein, 15 aa, Artificial Sequence
  Description of Artificial Sequence: Synthetic peptide
  Seed: HIHIFSFTGEEMATK
HIHFFSFTSEETATK

SEQ ID NO: 278117 - protein, 15 aa, Artificial Sequence
  Description of Artificial Sequence: Synthetic peptide
  Seed: HIHIFSFTGEEMATK
HIHFFSFTTEEAATK

SEQ ID NO: 278118 - protein, 15 aa, Artificial Sequence
  Description of Artificial Sequence: Synthetic peptide
  Seed: HIHIFSFTGEEMATK
HIHFFSFTTEEDATK

SEQ ID NO: 278119 - protein, 15 aa, Artificial Sequence
  Description of Artificial Sequence: Synthetic peptide
  Seed: HIHIFSFTGEEMATK
HIHFFSFTTEEEATK

SEQ ID NO: 278120 - protein, 15 aa, Artificial Sequence
  Description of Artificial Sequence: Synthetic peptide
  Seed: HIHIFSFTGEEMATK
HIHFFSFTTEEFATK

SEQ ID NO: 278121 - protein, 15 aa, Artificial Sequence
  Description of Artificial Sequence: Synthetic peptide
  Seed: HIHIFSFTGEEMATK
HIHFFSFTTEEHATK

SEQ ID NO: 278122 - protein, 15 aa, Artificial Sequence
  Description of Artificial Sequence: Synthetic peptide
  Seed: HIHIFSFTGEEMATK
HIHFFSFTTEEIATK

SEQ ID NO: 278123 - protein, 15 aa, Artificial Sequence
  Description of Artificial Sequence: Synthetic peptide
  Seed: HIHIFSFTGEEMATK
HIHFFSFTTEELATK

SEQ ID NO: 278124 - protein, 15 aa, Artificial Sequence
  Description of Artificial Sequence: Synthetic peptide
  Seed: HIHIFSFTGEEMATK
HIHFFSFTTEEMATK

SEQ ID NO: 278125 - protein, 15 aa, Artificial Sequence
  Description of Artificial Sequence: Synthetic peptide
  Seed: HIHIFSFTGEEMATK
HIHFFSFTTEENATK

SEQ ID NO: 278126 - protein, 15 aa, Artificial Sequence
  Description of Artificial Sequence: Synthetic peptide
  Seed: HIHIFSFTGEEMATK
HIHFFSFTTEESATK

SEQ ID NO: 278127 - protein, 15 aa, Artificial Sequence
  Description of Artificial Sequence: Synthetic peptide
  Seed: HIHIFSFTGEEMATK
HIHFFSFTTEETATK

SEQ ID NO: 278128 - protein, 15 aa, Artificial Sequence
  Description of Artificial Sequence: Synthetic peptide
  Seed: HIHIFSFTGEEMATK
HIHFFSFTTEEVATK

SEQ ID NO: 278129 - protein, 15 aa, Artificial Sequence
  Description of Artificial Sequence: Synthetic peptide
  Seed: HIHIFSFTGEEMATK
HIHFFSFTVEEAATK

SEQ ID NO: 278130 - protein, 15 aa, Artificial Sequence
  Description of Artificial Sequence: Synthetic peptide
  Seed: HIHIFSFTGEEMATK
HIHFFSFTVEEFATK

SEQ ID NO: 278131 - protein, 15 aa, Artificial Sequence
  Description of Artificial Sequence: Synthetic peptide
  Seed: HIHIFSFTGEEMATK
HIHFFSFTVEEGATK

SEQ ID NO: 278132 - protein, 15 aa, Artificial Sequence
  Description of Artificial Sequence: Synthetic peptide
  Seed: HIHIFSFTGEEMATK
HIHFFSFTVEEHATK

SEQ ID NO: 278133 - protein, 15 aa, Artificial Sequence
  Description of Artificial Sequence: Synthetic peptide
  Seed: HIHIFSFTGEEMATK
HIHFFSFTVEEIATK

SEQ ID NO: 278134 - protein, 15 aa, Artificial Sequence
  Description of Artificial Sequence: Synthetic peptide
  Seed: HIHIFSFTGEEMATK
HIHFFSFTVEELATK

SEQ ID NO: 278135 - protein, 15 aa, Artificial Sequence
  Description of Artificial Sequence: Synthetic peptide
  Seed: HIHIFSFTGEEMATK
HIHFFSFTVEEMATK

SEQ ID NO: 278136 - protein, 15 aa, Artificial Sequence
  Description of Artificial Sequence: Synthetic peptide
  Seed: HIHIFSFTGEEMATK
HIHFFSFTVEENATK

SEQ ID NO: 278137 - protein, 15 aa, Artificial Sequence
  Description of Artificial Sequence: Synthetic peptide
  Seed: HIHIFSFTGEEMATK
HIHFFSFTVEESATK

SEQ ID NO: 278138 - protein, 15 aa, Artificial Sequence
  Description of Artificial Sequence: Synthetic peptide
  Seed: HIHIFSFTGEEMATK
HIHFFSFTVEETATK

SEQ ID NO: 278139 - protein, 15 aa, Artificial Sequence
  Description of Artificial Sequence: Synthetic peptide
  Seed: HIHIFSFTGEEMATK
HIHFFSFTVEEVATK

SEQ ID NO: 278140 - protein, 15 aa, Artificial Sequence
  Description of Artificial Sequence: Synthetic peptide
  Seed: HIHIFSFTGEEMATK
HIHFFSFTVEEYATK

SEQ ID NO: 278141 - protein, 15 aa, Artificial Sequence
  Description of Artificial Sequence: Synthetic peptide
  Seed: HIHIFSFTGEEMATK
HIHFFSFTWEEAATK

SEQ ID NO: 278142 - protein, 15 aa, Artificial Sequence
  Description of Artificial Sequence: Synthetic peptide
  Seed: HIHIFSFTGEEMATK
HIHFFSFTWEEEATK

SEQ ID NO: 278143 - protein, 15 aa, Artificial Sequence
  Description of Artificial Sequence: Synthetic peptide
  Seed: HIHIFSFTGEEMATK
HIHFFSFTWEEFATK

SEQ ID NO: 278144 - protein, 15 aa, Artificial Sequence
  Description of Artificial Sequence: Synthetic peptide
  Seed: HIHIFSFTGEEMATK
HIHFFSFTWEEHATK

SEQ ID NO: 278145 - protein, 15 aa, Artificial Sequence
  Description of Artificial Sequence: Synthetic peptide
  Seed: HIHIFSFTGEEMATK
HIHFFSFTWEEIATK

SEQ ID NO: 278146 - protein, 15 aa, Artificial Sequence
  Description of Artificial Sequence: Synthetic peptide
  Seed: HIHIFSFTGEEMATK
HIHFFSFTWEELATK

SEQ ID NO: 278147 - protein, 15 aa, Artificial Sequence
  Description of Artificial Sequence: Synthetic peptide
  Seed: HIHIFSFTGEEMATK
HIHFFSFTWEEMATK

SEQ ID NO: 278148 - protein, 15 aa, Artificial Sequence
  Description of Artificial Sequence: Synthetic peptide
  Seed: HIHIFSFTGEEMATK
HIHFFSFTWEENATK

SEQ ID NO: 278149 - protein, 15 aa, Artificial Sequence
  Description of Artificial Sequence: Synthetic peptide
  Seed: HIHIFSFTGEEMATK
HIHFFSFTWEEPATK

SEQ ID NO: 278150 - protein, 15 aa, Artificial Sequence
  Description of Artificial Sequence: Synthetic peptide
  Seed: HIHIFSFTGEEMATK
HIHFFSFTWEERATK

SEQ ID NO: 278151 - protein, 15 aa, Artificial Sequence
  Description of Artificial Sequence: Synthetic peptide
  Seed: HIHIFSFTGEEMATK
HIHFFSFTWEESATK

SEQ ID NO: 278152 - protein, 15 aa, Artificial Sequence
  Description of Artificial Sequence: Synthetic peptide
  Seed: HIHIFSFTGEEMATK
HIHFFSFTWEETATK

SEQ ID NO: 278153 - protein, 15 aa, Artificial Sequence
  Description of Artificial Sequence: Synthetic peptide
  Seed: HIHIFSFTGEEMATK
HIHFFSFTWEEVATK

SEQ ID NO: 278154 - protein, 15 aa, Artificial Sequence
  Description of Artificial Sequence: Synthetic peptide
  Seed: HIHIFSFTGEEMATK
HIHFFSFTWEEWATK

SEQ ID NO: 278155 - protein, 15 aa, Artificial Sequence
  Description of Artificial Sequence: Synthetic peptide
  Seed: HIHIFSFTGEEMATK
HIHFFSFTWEEYATK

SEQ ID NO: 278156 - protein, 15 aa, Artificial Sequence
  Description of Artificial Sequence: Synthetic peptide
  Seed: HIHIFSFTGEEMATK
HIHFFSFTYEEAATK

SEQ ID NO: 278157 - protein, 15 aa, Artificial Sequence
  Description of Artificial Sequence: Synthetic peptide
  Seed: HIHIFSFTGEEMATK
HIHFFSFTYEEEATK

SEQ ID NO: 278158 - protein, 15 aa, Artificial Sequence
  Description of Artificial Sequence: Synthetic peptide
  Seed: HIHIFSFTGEEMATK
HIHFFSFTYEEFATK

SEQ ID NO: 278159 - protein, 15 aa, Artificial Sequence
  Description of Artificial Sequence: Synthetic peptide
  Seed: HIHIFSFTGEEMATK
HIHFFSFTYEEHATK

SEQ ID NO: 278160 - protein, 15 aa, Artificial Sequence
  Description of Artificial Sequence: Synthetic peptide
  Seed: HIHIFSFTGEEMATK
HIHFFSFTYEEIATK

SEQ ID NO: 278161 - protein, 15 aa, Artificial Sequence
  Description of Artificial Sequence: Synthetic peptide
  Seed: HIHIFSFTGEEMATK
HIHFFSFTYEELATK

SEQ ID NO: 278162 - protein, 15 aa, Artificial Sequence
  Description of Artificial Sequence: Synthetic peptide
  Seed: HIHIFSFTGEEMATK
HIHFFSFTYEEMATK

SEQ ID NO: 278163 - protein, 15 aa, Artificial Sequence
  Description of Artificial Sequence: Synthetic peptide
  Seed: HIHIFSFTGEEMATK
HIHFFSFTYEENATK

SEQ ID NO: 278164 - protein, 15 aa, Artificial Sequence
  Description of Artificial Sequence: Synthetic peptide
  Seed: HIHIFSFTGEEMATK
HIHFFSFTYEEPATK

SEQ ID NO: 278165 - protein, 15 aa, Artificial Sequence
  Description of Artificial Sequence: Synthetic peptide
  Seed: HIHIFSFTGEEMATK
HIHFFSFTYEERATK

SEQ ID NO: 278166 - protein, 15 aa, Artificial Sequence
  Description of Artificial Sequence: Synthetic peptide
  Seed: HIHIFSFTGEEMATK
HIHFFSFTYEESATK

SEQ ID NO: 278167 - protein, 15 aa, Artificial Sequence
  Description of Artificial Sequence: Synthetic peptide
  Seed: HIHIFSFTGEEMATK
HIHFFSFTYEETATK

SEQ ID NO: 278168 - protein, 15 aa, Artificial Sequence
  Description of Artificial Sequence: Synthetic peptide
  Seed: HIHIFSFTGEEMATK
HIHFFSFTYEEVATK

SEQ ID NO: 278169 - protein, 15 aa, Artificial Sequence
  Description of Artificial Sequence: Synthetic peptide
  Seed: HIHIFSFTGEEMATK
HIHFFSFTYEEWATK

SEQ ID NO: 278170 - protein, 15 aa, Artificial Sequence
  Description of Artificial Sequence: Synthetic peptide
  Seed: HIHIFSFTGEEMATK
HIHFFSFTYEEYATK

SEQ ID NO: 278171 - protein, 15 aa, Artificial Sequence
  Description of Artificial Sequence: Synthetic peptide
  Seed: HIHIFSFTGEEMATK
HIHFFSGTAEEAATK

SEQ ID NO: 278172 - protein, 15 aa, Artificial Sequence
  Description of Artificial Sequence: Synthetic peptide
  Seed: HIHIFSFTGEEMATK
HIHFFSGTAEEIATK

SEQ ID NO: 278173 - protein, 15 aa, Artificial Sequence
  Description of Artificial Sequence: Synthetic peptide
  Seed: HIHIFSFTGEEMATK
HIHFFSGTAEELATK

SEQ ID NO: 278174 - protein, 15 aa, Artificial Sequence
  Description of Artificial Sequence: Synthetic peptide
  Seed: HIHIFSFTGEEMATK
HIHFFSGTAEEVATK

SEQ ID NO: 278175 - protein, 15 aa, Artificial Sequence
  Description of Artificial Sequence: Synthetic peptide
  Seed: HIHIFSFTGEEMATK
HIHFFSGTFEEAATK

SEQ ID NO: 278176 - protein, 15 aa, Artificial Sequence
  Description of Artificial Sequence: Synthetic peptide
  Seed: HIHIFSFTGEEMATK
HIHFFSGTFEEFATK

SEQ ID NO: 278177 - protein, 15 aa, Artificial Sequence
  Description of Artificial Sequence: Synthetic peptide
  Seed: HIHIFSFTGEEMATK
HIHFFSGTFEEIATK

SEQ ID NO: 278178 - protein, 15 aa, Artificial Sequence
  Description of Artificial Sequence: Synthetic peptide
  Seed: HIHIFSFTGEEMATK
HIHFFSGTFEELATK

SEQ ID NO: 278179 - protein, 15 aa, Artificial Sequence
  Description of Artificial Sequence: Synthetic peptide
  Seed: HIHIFSFTGEEMATK
HIHFFSGTFEEMATK

SEQ ID NO: 278180 - protein, 15 aa, Artificial Sequence
  Description of Artificial Sequence: Synthetic peptide
  Seed: HIHIFSFTGEEMATK
HIHFFSGTFEETATK

SEQ ID NO: 278181 - protein, 15 aa, Artificial Sequence
  Description of Artificial Sequence: Synthetic peptide
  Seed: HIHIFSFTGEEMATK
HIHFFSGTFEEVATK

SEQ ID NO: 278182 - protein, 15 aa, Artificial Sequence
  Description of Artificial Sequence: Synthetic peptide
  Seed: HIHIFSFTGEEMATK
HIHFFSGTFEEYATK

SEQ ID NO: 278183 - protein, 15 aa, Artificial Sequence
  Description of Artificial Sequence: Synthetic peptide
  Seed: HIHIFSFTGEEMATK
HIHFFSGTGEELATK

SEQ ID NO: 278184 - protein, 15 aa, Artificial Sequence
  Description of Artificial Sequence: Synthetic peptide
  Seed: HIHIFSFTGEEMATK
HIHFFSGTLEEIATK

SEQ ID NO: 278185 - protein, 15 aa, Artificial Sequence
  Description of Artificial Sequence: Synthetic peptide
  Seed: HIHIFSFTGEEMATK
HIHFFSGTLEELATK

SEQ ID NO: 278186 - protein, 15 aa, Artificial Sequence
  Description of Artificial Sequence: Synthetic peptide
  Seed: HIHIFSFTGEEMATK
HIHFFSGTSEELATK

SEQ ID NO: 278187 - protein, 15 aa, Artificial Sequence
  Description of Artificial Sequence: Synthetic peptide
  Seed: HIHIFSFTGEEMATK
HIHFFSGTWEELATK

SEQ ID NO: 278188 - protein, 15 aa, Artificial Sequence
  Description of Artificial Sequence: Synthetic peptide
  Seed: HIHIFSFTGEEMATK
HIHFFSGTYEEIATK

SEQ ID NO: 278189 - protein, 15 aa, Artificial Sequence
  Description of Artificial Sequence: Synthetic peptide
  Seed: HIHIFSFTGEEMATK
HIHFFSGTYEELATK

SEQ ID NO: 278190 - protein, 15 aa, Artificial Sequence
  Description of Artificial Sequence: Synthetic peptide
  Seed: HIHIFSFTGEEMATK
HIHFFSGTYEEVATK

SEQ ID NO: 278191 - protein, 15 aa, Artificial Sequence
  Description of Artificial Sequence: Synthetic peptide
  Seed: HIHIFSFTGEEMATK
HIHFFSHTAEEAATK

SEQ ID NO: 278192 - protein, 15 aa, Artificial Sequence
  Description of Artificial Sequence: Synthetic peptide
  Seed: HIHIFSFTGEEMATK
HIHFFSHTAEEIATK

SEQ ID NO: 278193 - protein, 15 aa, Artificial Sequence
  Description of Artificial Sequence: Synthetic peptide
  Seed: HIHIFSFTGEEMATK
HIHFFSHTAEELATK

SEQ ID NO: 278194 - protein, 15 aa, Artificial Sequence
  Description of Artificial Sequence: Synthetic peptide
  Seed: HIHIFSFTGEEMATK
HIHFFSHTAEEVATK

SEQ ID NO: 278195 - protein, 15 aa, Artificial Sequence
  Description of Artificial Sequence: Synthetic peptide
  Seed: HIHIFSFTGEEMATK
HIHFFSHTFEEAATK

SEQ ID NO: 278196 - protein, 15 aa, Artificial Sequence
  Description of Artificial Sequence: Synthetic peptide
  Seed: HIHIFSFTGEEMATK
HIHFFSHTFEECATK

SEQ ID NO: 278197 - protein, 15 aa, Artificial Sequence
  Description of Artificial Sequence: Synthetic peptide
  Seed: HIHIFSFTGEEMATK
HIHFFSHTFEEDATK

SEQ ID NO: 278198 - protein, 15 aa, Artificial Sequence
  Description of Artificial Sequence: Synthetic peptide
  Seed: HIHIFSFTGEEMATK
HIHFFSHTFEEEATK

SEQ ID NO: 278199 - protein, 15 aa, Artificial Sequence
  Description of Artificial Sequence: Synthetic peptide
  Seed: HIHIFSFTGEEMATK
HIHFFSHTFEEFATK

SEQ ID NO: 278200 - protein, 15 aa, Artificial Sequence
  Description of Artificial Sequence: Synthetic peptide
  Seed: HIHIFSFTGEEMATK
HIHFFSHTFEEGATK

SEQ ID NO: 278201 - protein, 15 aa, Artificial Sequence
  Description of Artificial Sequence: Synthetic peptide
  Seed: HIHIFSFTGEEMATK
HIHFFSHTFEEHATK

SEQ ID NO: 278202 - protein, 15 aa, Artificial Sequence
  Description of Artificial Sequence: Synthetic peptide
  Seed: HIHIFSFTGEEMATK
HIHFFSHTFEEIATK

SEQ ID NO: 278203 - protein, 15 aa, Artificial Sequence
  Description of Artificial Sequence: Synthetic peptide
  Seed: HIHIFSFTGEEMATK
HIHFFSHTFEEKATK

SEQ ID NO: 278204 - protein, 15 aa, Artificial Sequence
  Description of Artificial Sequence: Synthetic peptide
  Seed: HIHIFSFTGEEMATK
HIHFFSHTFEEMATK

SEQ ID NO: 278205 - protein, 15 aa, Artificial Sequence
  Description of Artificial Sequence: Synthetic peptide
  Seed: HIHIFSFTGEEMATK
HIHFFSHTFEENATK

SEQ ID NO: 278206 - protein, 15 aa, Artificial Sequence
  Description of Artificial Sequence: Synthetic peptide
  Seed: HIHIFSFTGEEMATK
HIHFFSHTFEEPATK

SEQ ID NO: 278207 - protein, 15 aa, Artificial Sequence
  Description of Artificial Sequence: Synthetic peptide
  Seed: HIHIFSFTGEEMATK
HIHFFSHTFEEQATK

SEQ ID NO: 278208 - protein, 15 aa, Artificial Sequence
  Description of Artificial Sequence: Synthetic peptide
  Seed: HIHIFSFTGEEMATK
HIHFFSHTFEERATK

SEQ ID NO: 278209 - protein, 15 aa, Artificial Sequence
  Description of Artificial Sequence: Synthetic peptide
  Seed: HIHIFSFTGEEMATK
HIHFFSHTFEESATK

SEQ ID NO: 278210 - protein, 15 aa, Artificial Sequence
  Description of Artificial Sequence: Synthetic peptide
  Seed: HIHIFSFTGEEMATK
HIHFFSHTFEETATK

SEQ ID NO: 278211 - protein, 15 aa, Artificial Sequence
  Description of Artificial Sequence: Synthetic peptide
  Seed: HIHIFSFTGEEMATK
HIHFFSHTFEEVATK

SEQ ID NO: 278212 - protein, 15 aa, Artificial Sequence
  Description of Artificial Sequence: Synthetic peptide
  Seed: HIHIFSFTGEEMATK
HIHFFSHTFEEWATK

SEQ ID NO: 278213 - protein, 15 aa, Artificial Sequence
  Description of Artificial Sequence: Synthetic peptide
  Seed: HIHIFSFTGEEMATK
HIHFFSHTFEEYATK

SEQ ID NO: 278214 - protein, 15 aa, Artificial Sequence
  Description of Artificial Sequence: Synthetic peptide
  Seed: HIHIFSFTGEEMATK
HIHFFSHTIEEFATK

SEQ ID NO: 278215 - protein, 15 aa, Artificial Sequence
  Description of Artificial Sequence: Synthetic peptide
  Seed: HIHIFSFTGEEMATK
HIHFFSHTIEEIATK

SEQ ID NO: 278216 - protein, 15 aa, Artificial Sequence
  Description of Artificial Sequence: Synthetic peptide
  Seed: HIHIFSFTGEEMATK
HIHFFSHTIEELATK

SEQ ID NO: 278217 - protein, 15 aa, Artificial Sequence
  Description of Artificial Sequence: Synthetic peptide
  Seed: HIHIFSFTGEEMATK
HIHFFSHTIEEMATK

SEQ ID NO: 278218 - protein, 15 aa, Artificial Sequence
  Description of Artificial Sequence: Synthetic peptide
  Seed: HIHIFSFTGEEMATK
HIHFFSHTIEETATK

SEQ ID NO: 278219 - protein, 15 aa, Artificial Sequence
  Description of Artificial Sequence: Synthetic peptide
  Seed: HIHIFSFTGEEMATK
HIHFFSHTIEEVATK

SEQ ID NO: 278220 - protein, 15 aa, Artificial Sequence
  Description of Artificial Sequence: Synthetic peptide
  Seed: HIHIFSFTGEEMATK
HIHFFSHTIEEYATK

SEQ ID NO: 278221 - protein, 15 aa, Artificial Sequence
  Description of Artificial Sequence: Synthetic peptide
  Seed: HIHIFSFTGEEMATK
HIHFFSHTLEEAATK

SEQ ID NO: 278222 - protein, 15 aa, Artificial Sequence
  Description of Artificial Sequence: Synthetic peptide
  Seed: HIHIFSFTGEEMATK
HIHFFSHTLEEFATK

SEQ ID NO: 278223 - protein, 15 aa, Artificial Sequence
  Description of Artificial Sequence: Synthetic peptide
  Seed: HIHIFSFTGEEMATK
HIHFFSHTLEEIATK

SEQ ID NO: 278224 - protein, 15 aa, Artificial Sequence
  Description of Artificial Sequence: Synthetic peptide
  Seed: HIHIFSFTGEEMATK
HIHFFSHTLEELATK

SEQ ID NO: 278225 - protein, 15 aa, Artificial Sequence
  Description of Artificial Sequence: Synthetic peptide
  Seed: HIHIFSFTGEEMATK
HIHFFSHTLEEMATK

SEQ ID NO: 278226 - protein, 15 aa, Artificial Sequence
  Description of Artificial Sequence: Synthetic peptide
  Seed: HIHIFSFTGEEMATK
HIHFFSHTLEESATK

SEQ ID NO: 278227 - protein, 15 aa, Artificial Sequence
  Description of Artificial Sequence: Synthetic peptide
  Seed: HIHIFSFTGEEMATK
HIHFFSHTLEETATK

SEQ ID NO: 278228 - protein, 15 aa, Artificial Sequence
  Description of Artificial Sequence: Synthetic peptide
  Seed: HIHIFSFTGEEMATK
HIHFFSHTLEEVATK

SEQ ID NO: 278229 - protein, 15 aa, Artificial Sequence
  Description of Artificial Sequence: Synthetic peptide
  Seed: HIHIFSFTGEEMATK
HIHFFSHTLEEWATK

SEQ ID NO: 278230 - protein, 15 aa, Artificial Sequence
  Description of Artificial Sequence: Synthetic peptide
  Seed: HIHIFSFTGEEMATK
HIHFFSHTLEEYATK

SEQ ID NO: 278231 - protein, 15 aa, Artificial Sequence
  Description of Artificial Sequence: Synthetic peptide
  Seed: HIHIFSFTGEEMATK
HIHFFSHTMEEFATK

SEQ ID NO: 278232 - protein, 15 aa, Artificial Sequence
  Description of Artificial Sequence: Synthetic peptide
  Seed: HIHIFSFTGEEMATK
HIHFFSHTMEEIATK

SEQ ID NO: 278233 - protein, 15 aa, Artificial Sequence
  Description of Artificial Sequence: Synthetic peptide
  Seed: HIHIFSFTGEEMATK
HIHFFSHTMEELATK

SEQ ID NO: 278234 - protein, 15 aa, Artificial Sequence
  Description of Artificial Sequence: Synthetic peptide
  Seed: HIHIFSFTGEEMATK
HIHFFSHTMEEMATK

SEQ ID NO: 278235 - protein, 15 aa, Artificial Sequence
  Description of Artificial Sequence: Synthetic peptide
  Seed: HIHIFSFTGEEMATK
HIHFFSHTMEEVATK

SEQ ID NO: 278236 - protein, 15 aa, Artificial Sequence
  Description of Artificial Sequence: Synthetic peptide
  Seed: HIHIFSFTGEEMATK
HIHFFSHTMEEYATK

SEQ ID NO: 278237 - protein, 15 aa, Artificial Sequence
  Description of Artificial Sequence: Synthetic peptide
  Seed: HIHIFSFTGEEMATK
HIHFFSHTVEEFATK

SEQ ID NO: 278238 - protein, 15 aa, Artificial Sequence
  Description of Artificial Sequence: Synthetic peptide
  Seed: HIHIFSFTGEEMATK
HIHFFSHTVEEIATK

SEQ ID NO: 278239 - protein, 15 aa, Artificial Sequence
  Description of Artificial Sequence: Synthetic peptide
  Seed: HIHIFSFTGEEMATK
HIHFFSHTVEELATK

SEQ ID NO: 278240 - protein, 15 aa, Artificial Sequence
  Description of Artificial Sequence: Synthetic peptide
  Seed: HIHIFSFTGEEMATK
HIHFFSHTVEEMATK

SEQ ID NO: 278241 - protein, 15 aa, Artificial Sequence
  Description of Artificial Sequence: Synthetic peptide
  Seed: HIHIFSFTGEEMATK
HIHFFSHTVEEVATK

SEQ ID NO: 278242 - protein, 15 aa, Artificial Sequence
  Description of Artificial Sequence: Synthetic peptide
  Seed: HIHIFSFTGEEMATK
HIHFFSHTWEEAATK

SEQ ID NO: 278243 - protein, 15 aa, Artificial Sequence
  Description of Artificial Sequence: Synthetic peptide
  Seed: HIHIFSFTGEEMATK
HIHFFSHTWEEFATK

SEQ ID NO: 278244 - protein, 15 aa, Artificial Sequence
  Description of Artificial Sequence: Synthetic peptide
  Seed: HIHIFSFTGEEMATK
HIHFFSHTWEEIATK

SEQ ID NO: 278245 - protein, 15 aa, Artificial Sequence
  Description of Artificial Sequence: Synthetic peptide
  Seed: HIHIFSFTGEEMATK
HIHFFSHTWEELATK

SEQ ID NO: 278246 - protein, 15 aa, Artificial Sequence
  Description of Artificial Sequence: Synthetic peptide
  Seed: HIHIFSFTGEEMATK
HIHFFSHTWEEMATK

SEQ ID NO: 278247 - protein, 15 aa, Artificial Sequence
  Description of Artificial Sequence: Synthetic peptide
  Seed: HIHIFSFTGEEMATK
HIHFFSHTWEESATK

SEQ ID NO: 278248 - protein, 15 aa, Artificial Sequence
  Description of Artificial Sequence: Synthetic peptide
  Seed: HIHIFSFTGEEMATK
HIHFFSHTWEETATK

SEQ ID NO: 278249 - protein, 15 aa, Artificial Sequence
  Description of Artificial Sequence: Synthetic peptide
  Seed: HIHIFSFTGEEMATK
HIHFFSHTWEEVATK

SEQ ID NO: 278250 - protein, 15 aa, Artificial Sequence
  Description of Artificial Sequence: Synthetic peptide
  Seed: HIHIFSFTGEEMATK
HIHFFSHTWEEYATK

SEQ ID NO: 278251 - protein, 15 aa, Artificial Sequence
  Description of Artificial Sequence: Synthetic peptide
  Seed: HIHIFSFTGEEMATK
HIHFFSHTYEEAATK

SEQ ID NO: 278252 - protein, 15 aa, Artificial Sequence
  Description of Artificial Sequence: Synthetic peptide
  Seed: HIHIFSFTGEEMATK
HIHFFSHTYEEFATK

SEQ ID NO: 278253 - protein, 15 aa, Artificial Sequence
  Description of Artificial Sequence: Synthetic peptide
  Seed: HIHIFSFTGEEMATK
HIHFFSHTYEEIATK

SEQ ID NO: 278254 - protein, 15 aa, Artificial Sequence
  Description of Artificial Sequence: Synthetic peptide
  Seed: HIHIFSFTGEEMATK
HIHFFSHTYEELATK

SEQ ID NO: 278255 - protein, 15 aa, Artificial Sequence
  Description of Artificial Sequence: Synthetic peptide
  Seed: HIHIFSFTGEEMATK
HIHFFSHTYEEMATK

SEQ ID NO: 278256 - protein, 15 aa, Artificial Sequence
  Description of Artificial Sequence: Synthetic peptide
  Seed: HIHIFSFTGEEMATK
HIHFFSHTYEESATK

SEQ ID NO: 278257 - protein, 15 aa, Artificial Sequence
  Description of Artificial Sequence: Synthetic peptide
  Seed: HIHIFSFTGEEMATK
HIHFFSHTYEETATK

SEQ ID NO: 278258 - protein, 15 aa, Artificial Sequence
  Description of Artificial Sequence: Synthetic peptide
  Seed: HIHIFSFTGEEMATK
HIHFFSHTYEEVATK

SEQ ID NO: 278259 - protein, 15 aa, Artificial Sequence
  Description of Artificial Sequence: Synthetic peptide
  Seed: HIHIFSFTGEEMATK
HIHFFSHTYEEWATK

SEQ ID NO: 278260 - protein, 15 aa, Artificial Sequence
  Description of Artificial Sequence: Synthetic peptide
  Seed: HIHIFSFTGEEMATK
HIHFFSHTYEEYATK

SEQ ID NO: 278261 - protein, 15 aa, Artificial Sequence
  Description of Artificial Sequence: Synthetic peptide
  Seed: HIHIFSFTGEEMATK
HIHFFSITAEECATK

SEQ ID NO: 278262 - protein, 15 aa, Artificial Sequence
  Description of Artificial Sequence: Synthetic peptide
  Seed: HIHIFSFTGEEMATK
HIHFFSITAEEDATK

SEQ ID NO: 278263 - protein, 15 aa, Artificial Sequence
  Description of Artificial Sequence: Synthetic peptide
  Seed: HIHIFSFTGEEMATK
HIHFFSITAEEEATK

SEQ ID NO: 278264 - protein, 15 aa, Artificial Sequence
  Description of Artificial Sequence: Synthetic peptide
  Seed: HIHIFSFTGEEMATK
HIHFFSITAEEFATK

SEQ ID NO: 278265 - protein, 15 aa, Artificial Sequence
  Description of Artificial Sequence: Synthetic peptide
  Seed: HIHIFSFTGEEMATK
HIHFFSITAEEGATK

SEQ ID NO: 278266 - protein, 15 aa, Artificial Sequence
  Description of Artificial Sequence: Synthetic peptide
  Seed: HIHIFSFTGEEMATK
HIHFFSITAEEHATK

SEQ ID NO: 278267 - protein, 15 aa, Artificial Sequence
  Description of Artificial Sequence: Synthetic peptide
  Seed: HIHIFSFTGEEMATK
HIHFFSITAEEIATK

SEQ ID NO: 278268 - protein, 15 aa, Artificial Sequence
  Description of Artificial Sequence: Synthetic peptide
  Seed: HIHIFSFTGEEMATK
HIHFFSITAEEKATK

SEQ ID NO: 278269 - protein, 15 aa, Artificial Sequence
  Description of Artificial Sequence: Synthetic peptide
  Seed: HIHIFSFTGEEMATK
HIHFFSITAEELATK

SEQ ID NO: 278270 - protein, 15 aa, Artificial Sequence
  Description of Artificial Sequence: Synthetic peptide
  Seed: HIHIFSFTGEEMATK
HIHFFSITAEEMATK

SEQ ID NO: 278271 - protein, 15 aa, Artificial Sequence
  Description of Artificial Sequence: Synthetic peptide
  Seed: HIHIFSFTGEEMATK
HIHFFSITAEENATK

SEQ ID NO: 278272 - protein, 15 aa, Artificial Sequence
  Description of Artificial Sequence: Synthetic peptide
  Seed: HIHIFSFTGEEMATK
HIHFFSITAEEPATK

SEQ ID NO: 278273 - protein, 15 aa, Artificial Sequence
  Description of Artificial Sequence: Synthetic peptide
  Seed: HIHIFSFTGEEMATK
HIHFFSITAEEQATK

SEQ ID NO: 278274 - protein, 15 aa, Artificial Sequence
  Description of Artificial Sequence: Synthetic peptide
  Seed: HIHIFSFTGEEMATK
HIHFFSITAEERATK

SEQ ID NO: 278275 - protein, 15 aa, Artificial Sequence
  Description of Artificial Sequence: Synthetic peptide
  Seed: HIHIFSFTGEEMATK
HIHFFSITAEESATK

SEQ ID NO: 278276 - protein, 15 aa, Artificial Sequence
  Description of Artificial Sequence: Synthetic peptide
  Seed: HIHIFSFTGEEMATK
HIHFFSITAEETATK

SEQ ID NO: 278277 - protein, 15 aa, Artificial Sequence
  Description of Artificial Sequence: Synthetic peptide
  Seed: HIHIFSFTGEEMATK
HIHFFSITAEEVATK

SEQ ID NO: 278278 - protein, 15 aa, Artificial Sequence
  Description of Artificial Sequence: Synthetic peptide
  Seed: HIHIFSFTGEEMATK
HIHFFSITAEEWATK

SEQ ID NO: 278279 - protein, 15 aa, Artificial Sequence
  Description of Artificial Sequence: Synthetic peptide
  Seed: HIHIFSFTGEEMATK
HIHFFSITAEEYATK

SEQ ID NO: 278280 - protein, 15 aa, Artificial Sequence
  Description of Artificial Sequence: Synthetic peptide
  Seed: HIHIFSFTGEEMATK
HIHFFSITFEEAATK

SEQ ID NO: 278281 - protein, 15 aa, Artificial Sequence
  Description of Artificial Sequence: Synthetic peptide
  Seed: HIHIFSFTGEEMATK
HIHFFSITFEECATK

SEQ ID NO: 278282 - protein, 15 aa, Artificial Sequence
  Description of Artificial Sequence: Synthetic peptide
  Seed: HIHIFSFTGEEMATK
HIHFFSITFEEDATK

SEQ ID NO: 278283 - protein, 15 aa, Artificial Sequence
  Description of Artificial Sequence: Synthetic peptide
  Seed: HIHIFSFTGEEMATK
HIHFFSITFEEEATK

SEQ ID NO: 278284 - protein, 15 aa, Artificial Sequence
  Description of Artificial Sequence: Synthetic peptide
  Seed: HIHIFSFTGEEMATK
HIHFFSITFEEFATK

SEQ ID NO: 278285 - protein, 15 aa, Artificial Sequence
  Description of Artificial Sequence: Synthetic peptide
  Seed: HIHIFSFTGEEMATK
HIHFFSITFEEGATK

SEQ ID NO: 278286 - protein, 15 aa, Artificial Sequence
  Description of Artificial Sequence: Synthetic peptide
  Seed: HIHIFSFTGEEMATK
HIHFFSITFEEHATK

SEQ ID NO: 278287 - protein, 15 aa, Artificial Sequence
  Description of Artificial Sequence: Synthetic peptide
  Seed: HIHIFSFTGEEMATK
HIHFFSITFEEIATK

SEQ ID NO: 278288 - protein, 15 aa, Artificial Sequence
  Description of Artificial Sequence: Synthetic peptide
  Seed: HIHIFSFTGEEMATK
HIHFFSITFEEKATK

SEQ ID NO: 278289 - protein, 15 aa, Artificial Sequence
  Description of Artificial Sequence: Synthetic peptide
  Seed: HIHIFSFTGEEMATK
HIHFFSITFEELATK

SEQ ID NO: 278290 - protein, 15 aa, Artificial Sequence
  Description of Artificial Sequence: Synthetic peptide
  Seed: HIHIFSFTGEEMATK
HIHFFSITFEEMATK

SEQ ID NO: 278291 - protein, 15 aa, Artificial Sequence
  Description of Artificial Sequence: Synthetic peptide
  Seed: HIHIFSFTGEEMATK
HIHFFSITFEENATK

SEQ ID NO: 278292 - protein, 15 aa, Artificial Sequence
  Description of Artificial Sequence: Synthetic peptide
  Seed: HIHIFSFTGEEMATK
HIHFFSITFEEPATK

SEQ ID NO: 278293 - protein, 15 aa, Artificial Sequence
  Description of Artificial Sequence: Synthetic peptide
  Seed: HIHIFSFTGEEMATK
HIHFFSITFEEQATK

SEQ ID NO: 278294 - protein, 15 aa, Artificial Sequence
  Description of Artificial Sequence: Synthetic peptide
  Seed: HIHIFSFTGEEMATK
HIHFFSITFEERATK

SEQ ID NO: 278295 - protein, 15 aa, Artificial Sequence
  Description of Artificial Sequence: Synthetic peptide
  Seed: HIHIFSFTGEEMATK
HIHFFSITFEESATK

SEQ ID NO: 278296 - protein, 15 aa, Artificial Sequence
  Description of Artificial Sequence: Synthetic peptide
  Seed: HIHIFSFTGEEMATK
HIHFFSITFEETATK

SEQ ID NO: 278297 - protein, 15 aa, Artificial Sequence
  Description of Artificial Sequence: Synthetic peptide
  Seed: HIHIFSFTGEEMATK
HIHFFSITFEEWATK

SEQ ID NO: 278298 - protein, 15 aa, Artificial Sequence
  Description of Artificial Sequence: Synthetic peptide
  Seed: HIHIFSFTGEEMATK
HIHFFSITFEEYATK

SEQ ID NO: 278299 - protein, 15 aa, Artificial Sequence
  Description of Artificial Sequence: Synthetic peptide
  Seed: HIHIFSFTGEEMATK
HIHFFSITGEEAATK

SEQ ID NO: 278300 - protein, 15 aa, Artificial Sequence
  Description of Artificial Sequence: Synthetic peptide
  Seed: HIHIFSFTGEEMATK
HIHFFSITGEECATK

SEQ ID NO: 278301 - protein, 15 aa, Artificial Sequence
  Description of Artificial Sequence: Synthetic peptide
  Seed: HIHIFSFTGEEMATK
HIHFFSITGEEFATK

SEQ ID NO: 278302 - protein, 15 aa, Artificial Sequence
  Description of Artificial Sequence: Synthetic peptide
  Seed: HIHIFSFTGEEMATK
HIHFFSITGEEGATK

SEQ ID NO: 278303 - protein, 15 aa, Artificial Sequence
  Description of Artificial Sequence: Synthetic peptide
  Seed: HIHIFSFTGEEMATK
HIHFFSITGEEHATK

SEQ ID NO: 278304 - protein, 15 aa, Artificial Sequence
  Description of Artificial Sequence: Synthetic peptide
  Seed: HIHIFSFTGEEMATK
HIHFFSITGEEIATK

SEQ ID NO: 278305 - protein, 15 aa, Artificial Sequence
  Description of Artificial Sequence: Synthetic peptide
  Seed: HIHIFSFTGEEMATK
HIHFFSITGEELATK

SEQ ID NO: 278306 - protein, 15 aa, Artificial Sequence
  Description of Artificial Sequence: Synthetic peptide
  Seed: HIHIFSFTGEEMATK
HIHFFSITGEEMATK

SEQ ID NO: 278307 - protein, 15 aa, Artificial Sequence
  Description of Artificial Sequence: Synthetic peptide
  Seed: HIHIFSFTGEEMATK
HIHFFSITGEENATK

SEQ ID NO: 278308 - protein, 15 aa, Artificial Sequence
  Description of Artificial Sequence: Synthetic peptide
  Seed: HIHIFSFTGEEMATK
HIHFFSITGEEPATK

SEQ ID NO: 278309 - protein, 15 aa, Artificial Sequence
  Description of Artificial Sequence: Synthetic peptide
  Seed: HIHIFSFTGEEMATK
HIHFFSITGEEQATK

SEQ ID NO: 278310 - protein, 15 aa, Artificial Sequence
  Description of Artificial Sequence: Synthetic peptide
  Seed: HIHIFSFTGEEMATK
HIHFFSITGEESATK

SEQ ID NO: 278311 - protein, 15 aa, Artificial Sequence
  Description of Artificial Sequence: Synthetic peptide
  Seed: HIHIFSFTGEEMATK
HIHFFSITGEETATK

SEQ ID NO: 278312 - protein, 15 aa, Artificial Sequence
  Description of Artificial Sequence: Synthetic peptide
  Seed: HIHIFSFTGEEMATK
HIHFFSITGEEVATK

SEQ ID NO: 278313 - protein, 15 aa, Artificial Sequence
  Description of Artificial Sequence: Synthetic peptide
  Seed: HIHIFSFTGEEMATK
HIHFFSITHEEAATK

SEQ ID NO: 278314 - protein, 15 aa, Artificial Sequence
  Description of Artificial Sequence: Synthetic peptide
  Seed: HIHIFSFTGEEMATK
HIHFFSITHEELATK

SEQ ID NO: 278315 - protein, 15 aa, Artificial Sequence
  Description of Artificial Sequence: Synthetic peptide
  Seed: HIHIFSFTGEEMATK
HIHFFSITIEEAATK

SEQ ID NO: 278316 - protein, 15 aa, Artificial Sequence
  Description of Artificial Sequence: Synthetic peptide
  Seed: HIHIFSFTGEEMATK
HIHFFSITIEEDATK

SEQ ID NO: 278317 - protein, 15 aa, Artificial Sequence
  Description of Artificial Sequence: Synthetic peptide
  Seed: HIHIFSFTGEEMATK
HIHFFSITIEEGATK

SEQ ID NO: 278318 - protein, 15 aa, Artificial Sequence
  Description of Artificial Sequence: Synthetic peptide
  Seed: HIHIFSFTGEEMATK
HIHFFSITIEEHATK

SEQ ID NO: 278319 - protein, 15 aa, Artificial Sequence
  Description of Artificial Sequence: Synthetic peptide
  Seed: HIHIFSFTGEEMATK
HIHFFSITIEEIATK

SEQ ID NO: 278320 - protein, 15 aa, Artificial Sequence
  Description of Artificial Sequence: Synthetic peptide
  Seed: HIHIFSFTGEEMATK
HIHFFSITIEEKATK

SEQ ID NO: 278321 - protein, 15 aa, Artificial Sequence
  Description of Artificial Sequence: Synthetic peptide
  Seed: HIHIFSFTGEEMATK
HIHFFSITIEELATK

SEQ ID NO: 278322 - protein, 15 aa, Artificial Sequence
  Description of Artificial Sequence: Synthetic peptide
  Seed: HIHIFSFTGEEMATK
HIHFFSITIEEMATK

SEQ ID NO: 278323 - protein, 15 aa, Artificial Sequence
  Description of Artificial Sequence: Synthetic peptide
  Seed: HIHIFSFTGEEMATK
HIHFFSITIEENATK

SEQ ID NO: 278324 - protein, 15 aa, Artificial Sequence
  Description of Artificial Sequence: Synthetic peptide
  Seed: HIHIFSFTGEEMATK
HIHFFSITIEEPATK

SEQ ID NO: 278325 - protein, 15 aa, Artificial Sequence
  Description of Artificial Sequence: Synthetic peptide
  Seed: HIHIFSFTGEEMATK
HIHFFSITIEEQATK

SEQ ID NO: 278326 - protein, 15 aa, Artificial Sequence
  Description of Artificial Sequence: Synthetic peptide
  Seed: HIHIFSFTGEEMATK
HIHFFSITIEESATK

SEQ ID NO: 278327 - protein, 15 aa, Artificial Sequence
  Description of Artificial Sequence: Synthetic peptide
  Seed: HIHIFSFTGEEMATK
HIHFFSITIEETATK

SEQ ID NO: 278328 - protein, 15 aa, Artificial Sequence
  Description of Artificial Sequence: Synthetic peptide
  Seed: HIHIFSFTGEEMATK
HIHFFSITIEEVATK

SEQ ID NO: 278329 - protein, 15 aa, Artificial Sequence
  Description of Artificial Sequence: Synthetic peptide
  Seed: HIHIFSFTGEEMATK
HIHFFSITIEEYATK

SEQ ID NO: 278330 - protein, 15 aa, Artificial Sequence
  Description of Artificial Sequence: Synthetic peptide
  Seed: HIHIFSFTGEEMATK
HIHFFSITLEEAATK

SEQ ID NO: 278331 - protein, 15 aa, Artificial Sequence
  Description of Artificial Sequence: Synthetic peptide
  Seed: HIHIFSFTGEEMATK
HIHFFSITLEEDATK

SEQ ID NO: 278332 - protein, 15 aa, Artificial Sequence
  Description of Artificial Sequence: Synthetic peptide
  Seed: HIHIFSFTGEEMATK
HIHFFSITLEEEATK

SEQ ID NO: 278333 - protein, 15 aa, Artificial Sequence
  Description of Artificial Sequence: Synthetic peptide
  Seed: HIHIFSFTGEEMATK
HIHFFSITLEEFATK

SEQ ID NO: 278334 - protein, 15 aa, Artificial Sequence
  Description of Artificial Sequence: Synthetic peptide
  Seed: HIHIFSFTGEEMATK
HIHFFSITLEEGATK

SEQ ID NO: 278335 - protein, 15 aa, Artificial Sequence
  Description of Artificial Sequence: Synthetic peptide
  Seed: HIHIFSFTGEEMATK
HIHFFSITLEEHATK

SEQ ID NO: 278336 - protein, 15 aa, Artificial Sequence
  Description of Artificial Sequence: Synthetic peptide
  Seed: HIHIFSFTGEEMATK
HIHFFSITLEEIATK

SEQ ID NO: 278337 - protein, 15 aa, Artificial Sequence
  Description of Artificial Sequence: Synthetic peptide
  Seed: HIHIFSFTGEEMATK
HIHFFSITLEELATK

SEQ ID NO: 278338 - protein, 15 aa, Artificial Sequence
  Description of Artificial Sequence: Synthetic peptide
  Seed: HIHIFSFTGEEMATK
HIHFFSITLEEMATK

SEQ ID NO: 278339 - protein, 15 aa, Artificial Sequence
  Description of Artificial Sequence: Synthetic peptide
  Seed: HIHIFSFTGEEMATK
HIHFFSITLEENATK

SEQ ID NO: 278340 - protein, 15 aa, Artificial Sequence
  Description of Artificial Sequence: Synthetic peptide
  Seed: HIHIFSFTGEEMATK
HIHFFSITLEEPATK

SEQ ID NO: 278341 - protein, 15 aa, Artificial Sequence
  Description of Artificial Sequence: Synthetic peptide
  Seed: HIHIFSFTGEEMATK
HIHFFSITLEERATK

SEQ ID NO: 278342 - protein, 15 aa, Artificial Sequence
  Description of Artificial Sequence: Synthetic peptide
  Seed: HIHIFSFTGEEMATK
HIHFFSITLEESATK

SEQ ID NO: 278343 - protein, 15 aa, Artificial Sequence
  Description of Artificial Sequence: Synthetic peptide
  Seed: HIHIFSFTGEEMATK
HIHFFSITLEETATK

SEQ ID NO: 278344 - protein, 15 aa, Artificial Sequence
  Description of Artificial Sequence: Synthetic peptide
  Seed: HIHIFSFTGEEMATK
HIHFFSITLEEVATK

SEQ ID NO: 278345 - protein, 15 aa, Artificial Sequence
  Description of Artificial Sequence: Synthetic peptide
  Seed: HIHIFSFTGEEMATK
HIHFFSITLEEYATK

SEQ ID NO: 278346 - protein, 15 aa, Artificial Sequence
  Description of Artificial Sequence: Synthetic peptide
  Seed: HIHIFSFTGEEMATK
HIHFFSITMEEAATK

SEQ ID NO: 278347 - protein, 15 aa, Artificial Sequence
  Description of Artificial Sequence: Synthetic peptide
  Seed: HIHIFSFTGEEMATK
HIHFFSITMEEDATK

SEQ ID NO: 278348 - protein, 15 aa, Artificial Sequence
  Description of Artificial Sequence: Synthetic peptide
  Seed: HIHIFSFTGEEMATK
HIHFFSITMEEEATK

SEQ ID NO: 278349 - protein, 15 aa, Artificial Sequence
  Description of Artificial Sequence: Synthetic peptide
  Seed: HIHIFSFTGEEMATK
HIHFFSITMEEFATK

SEQ ID NO: 278350 - protein, 15 aa, Artificial Sequence
  Description of Artificial Sequence: Synthetic peptide
  Seed: HIHIFSFTGEEMATK
HIHFFSITMEEGATK

SEQ ID NO: 278351 - protein, 15 aa, Artificial Sequence
  Description of Artificial Sequence: Synthetic peptide
  Seed: HIHIFSFTGEEMATK
HIHFFSITMEEHATK

SEQ ID NO: 278352 - protein, 15 aa, Artificial Sequence
  Description of Artificial Sequence: Synthetic peptide
  Seed: HIHIFSFTGEEMATK
HIHFFSITMEEIATK

SEQ ID NO: 278353 - protein, 15 aa, Artificial Sequence
  Description of Artificial Sequence: Synthetic peptide
  Seed: HIHIFSFTGEEMATK
HIHFFSITMEELATK

SEQ ID NO: 278354 - protein, 15 aa, Artificial Sequence
  Description of Artificial Sequence: Synthetic peptide
  Seed: HIHIFSFTGEEMATK
HIHFFSITMEEMATK

SEQ ID NO: 278355 - protein, 15 aa, Artificial Sequence
  Description of Artificial Sequence: Synthetic peptide
  Seed: HIHIFSFTGEEMATK
HIHFFSITMEENATK

SEQ ID NO: 278356 - protein, 15 aa, Artificial Sequence
  Description of Artificial Sequence: Synthetic peptide
  Seed: HIHIFSFTGEEMATK
HIHFFSITMEESATK

SEQ ID NO: 278357 - protein, 15 aa, Artificial Sequence
  Description of Artificial Sequence: Synthetic peptide
  Seed: HIHIFSFTGEEMATK
HIHFFSITMEETATK

SEQ ID NO: 278358 - protein, 15 aa, Artificial Sequence
  Description of Artificial Sequence: Synthetic peptide
  Seed: HIHIFSFTGEEMATK
HIHFFSITMEEVATK

SEQ ID NO: 278359 - protein, 15 aa, Artificial Sequence
  Description of Artificial Sequence: Synthetic peptide
  Seed: HIHIFSFTGEEMATK
HIHFFSITMEEYATK

SEQ ID NO: 278360 - protein, 15 aa, Artificial Sequence
  Description of Artificial Sequence: Synthetic peptide
  Seed: HIHIFSFTGEEMATK
HIHFFSITNEEAATK

SEQ ID NO: 278361 - protein, 15 aa, Artificial Sequence
  Description of Artificial Sequence: Synthetic peptide
  Seed: HIHIFSFTGEEMATK
HIHFFSITNEEDATK

SEQ ID NO: 278362 - protein, 15 aa, Artificial Sequence
  Description of Artificial Sequence: Synthetic peptide
  Seed: HIHIFSFTGEEMATK
HIHFFSITNEEEATK

SEQ ID NO: 278363 - protein, 15 aa, Artificial Sequence
  Description of Artificial Sequence: Synthetic peptide
  Seed: HIHIFSFTGEEMATK
HIHFFSITNEEGATK

SEQ ID NO: 278364 - protein, 15 aa, Artificial Sequence
  Description of Artificial Sequence: Synthetic peptide
  Seed: HIHIFSFTGEEMATK
HIHFFSITNEEHATK

SEQ ID NO: 278365 - protein, 15 aa, Artificial Sequence
  Description of Artificial Sequence: Synthetic peptide
  Seed: HIHIFSFTGEEMATK
HIHFFSITNEEIATK

SEQ ID NO: 278366 - protein, 15 aa, Artificial Sequence
  Description of Artificial Sequence: Synthetic peptide
  Seed: HIHIFSFTGEEMATK
HIHFFSITNEELATK

SEQ ID NO: 278367 - protein, 15 aa, Artificial Sequence
  Description of Artificial Sequence: Synthetic peptide
  Seed: HIHIFSFTGEEMATK
HIHFFSITNEEMATK

SEQ ID NO: 278368 - protein, 15 aa, Artificial Sequence
  Description of Artificial Sequence: Synthetic peptide
  Seed: HIHIFSFTGEEMATK
HIHFFSITNEENATK

SEQ ID NO: 278369 - protein, 15 aa, Artificial Sequence
  Description of Artificial Sequence: Synthetic peptide
  Seed: HIHIFSFTGEEMATK
HIHFFSITNEESATK

SEQ ID NO: 278370 - protein, 15 aa, Artificial Sequence
  Description of Artificial Sequence: Synthetic peptide
  Seed: HIHIFSFTGEEMATK
HIHFFSITNEETATK

SEQ ID NO: 278371 - protein, 15 aa, Artificial Sequence
  Description of Artificial Sequence: Synthetic peptide
  Seed: HIHIFSFTGEEMATK
HIHFFSITNEEVATK

SEQ ID NO: 278372 - protein, 15 aa, Artificial Sequence
  Description of Artificial Sequence: Synthetic peptide
  Seed: HIHIFSFTGEEMATK
HIHFFSITPEEAATK

SEQ ID NO: 278373 - protein, 15 aa, Artificial Sequence
  Description of Artificial Sequence: Synthetic peptide
  Seed: HIHIFSFTGEEMATK
HIHFFSITPEECATK

SEQ ID NO: 278374 - protein, 15 aa, Artificial Sequence
  Description of Artificial Sequence: Synthetic peptide
  Seed: HIHIFSFTGEEMATK
HIHFFSITPEEEATK

SEQ ID NO: 278375 - protein, 15 aa, Artificial Sequence
  Description of Artificial Sequence: Synthetic peptide
  Seed: HIHIFSFTGEEMATK
HIHFFSITPEEFATK

SEQ ID NO: 278376 - protein, 15 aa, Artificial Sequence
  Description of Artificial Sequence: Synthetic peptide
  Seed: HIHIFSFTGEEMATK
HIHFFSITPEEGATK

SEQ ID NO: 278377 - protein, 15 aa, Artificial Sequence
  Description of Artificial Sequence: Synthetic peptide
  Seed: HIHIFSFTGEEMATK
HIHFFSITPEEHATK

SEQ ID NO: 278378 - protein, 15 aa, Artificial Sequence
  Description of Artificial Sequence: Synthetic peptide
  Seed: HIHIFSFTGEEMATK
HIHFFSITPEEIATK

SEQ ID NO: 278379 - protein, 15 aa, Artificial Sequence
  Description of Artificial Sequence: Synthetic peptide
  Seed: HIHIFSFTGEEMATK
HIHFFSITPEELATK

SEQ ID NO: 278380 - protein, 15 aa, Artificial Sequence
  Description of Artificial Sequence: Synthetic peptide
  Seed: HIHIFSFTGEEMATK
HIHFFSITPEEMATK

SEQ ID NO: 278381 - protein, 15 aa, Artificial Sequence
  Description of Artificial Sequence: Synthetic peptide
  Seed: HIHIFSFTGEEMATK
HIHFFSITPEENATK

SEQ ID NO: 278382 - protein, 15 aa, Artificial Sequence
  Description of Artificial Sequence: Synthetic peptide
  Seed: HIHIFSFTGEEMATK
HIHFFSITPEEPATK

SEQ ID NO: 278383 - protein, 15 aa, Artificial Sequence
  Description of Artificial Sequence: Synthetic peptide
  Seed: HIHIFSFTGEEMATK
HIHFFSITPEEQATK

SEQ ID NO: 278384 - protein, 15 aa, Artificial Sequence
  Description of Artificial Sequence: Synthetic peptide
  Seed: HIHIFSFTGEEMATK
HIHFFSITPEESATK

SEQ ID NO: 278385 - protein, 15 aa, Artificial Sequence
  Description of Artificial Sequence: Synthetic peptide
  Seed: HIHIFSFTGEEMATK
HIHFFSITPEETATK

SEQ ID NO: 278386 - protein, 15 aa, Artificial Sequence
  Description of Artificial Sequence: Synthetic peptide
  Seed: HIHIFSFTGEEMATK
HIHFFSITPEEVATK

SEQ ID NO: 278387 - protein, 15 aa, Artificial Sequence
  Description of Artificial Sequence: Synthetic peptide
  Seed: HIHIFSFTGEEMATK
HIHFFSITPEEWATK

SEQ ID NO: 278388 - protein, 15 aa, Artificial Sequence
  Description of Artificial Sequence: Synthetic peptide
  Seed: HIHIFSFTGEEMATK
HIHFFSITPEEYATK

SEQ ID NO: 278389 - protein, 15 aa, Artificial Sequence
  Description of Artificial Sequence: Synthetic peptide
  Seed: HIHIFSFTGEEMATK
HIHFFSITQEEAATK

SEQ ID NO: 278390 - protein, 15 aa, Artificial Sequence
  Description of Artificial Sequence: Synthetic peptide
  Seed: HIHIFSFTGEEMATK
HIHFFSITQEELATK

SEQ ID NO: 278391 - protein, 15 aa, Artificial Sequence
  Description of Artificial Sequence: Synthetic peptide
  Seed: HIHIFSFTGEEMATK
HIHFFSITSEEAATK

SEQ ID NO: 278392 - protein, 15 aa, Artificial Sequence
  Description of Artificial Sequence: Synthetic peptide
  Seed: HIHIFSFTGEEMATK
HIHFFSITSEECATK

SEQ ID NO: 278393 - protein, 15 aa, Artificial Sequence
  Description of Artificial Sequence: Synthetic peptide
  Seed: HIHIFSFTGEEMATK
HIHFFSITSEEDATK

SEQ ID NO: 278394 - protein, 15 aa, Artificial Sequence
  Description of Artificial Sequence: Synthetic peptide
  Seed: HIHIFSFTGEEMATK
HIHFFSITSEEEATK

SEQ ID NO: 278395 - protein, 15 aa, Artificial Sequence
  Description of Artificial Sequence: Synthetic peptide
  Seed: HIHIFSFTGEEMATK
HIHFFSITSEEFATK

SEQ ID NO: 278396 - protein, 15 aa, Artificial Sequence
  Description of Artificial Sequence: Synthetic peptide
  Seed: HIHIFSFTGEEMATK
HIHFFSITSEEGATK

SEQ ID NO: 278397 - protein, 15 aa, Artificial Sequence
  Description of Artificial Sequence: Synthetic peptide
  Seed: HIHIFSFTGEEMATK
HIHFFSITSEEHATK

SEQ ID NO: 278398 - protein, 15 aa, Artificial Sequence
  Description of Artificial Sequence: Synthetic peptide
  Seed: HIHIFSFTGEEMATK
HIHFFSITSEEIATK

SEQ ID NO: 278399 - protein, 15 aa, Artificial Sequence
  Description of Artificial Sequence: Synthetic peptide
  Seed: HIHIFSFTGEEMATK
HIHFFSITSEELATK

SEQ ID NO: 278400 - protein, 15 aa, Artificial Sequence
  Description of Artificial Sequence: Synthetic peptide
  Seed: HIHIFSFTGEEMATK
HIHFFSITSEEMATK

SEQ ID NO: 278401 - protein, 15 aa, Artificial Sequence
  Description of Artificial Sequence: Synthetic peptide
  Seed: HIHIFSFTGEEMATK
HIHFFSITSEENATK

SEQ ID NO: 278402 - protein, 15 aa, Artificial Sequence
  Description of Artificial Sequence: Synthetic peptide
  Seed: HIHIFSFTGEEMATK
HIHFFSITSEEPATK

SEQ ID NO: 278403 - protein, 15 aa, Artificial Sequence
  Description of Artificial Sequence: Synthetic peptide
  Seed: HIHIFSFTGEEMATK
HIHFFSITSEEQATK

SEQ ID NO: 278404 - protein, 15 aa, Artificial Sequence
  Description of Artificial Sequence: Synthetic peptide
  Seed: HIHIFSFTGEEMATK
HIHFFSITSEESATK

SEQ ID NO: 278405 - protein, 15 aa, Artificial Sequence
  Description of Artificial Sequence: Synthetic peptide
  Seed: HIHIFSFTGEEMATK
HIHFFSITSEETATK

SEQ ID NO: 278406 - protein, 15 aa, Artificial Sequence
  Description of Artificial Sequence: Synthetic peptide
  Seed: HIHIFSFTGEEMATK
HIHFFSITSEEVATK

SEQ ID NO: 278407 - protein, 15 aa, Artificial Sequence
  Description of Artificial Sequence: Synthetic peptide
  Seed: HIHIFSFTGEEMATK
HIHFFSITSEEYATK

SEQ ID NO: 278408 - protein, 15 aa, Artificial Sequence
  Description of Artificial Sequence: Synthetic peptide
  Seed: HIHIFSFTGEEMATK
HIHFFSITTEEAATK

SEQ ID NO: 278409 - protein, 15 aa, Artificial Sequence
  Description of Artificial Sequence: Synthetic peptide
  Seed: HIHIFSFTGEEMATK
HIHFFSITTEEDATK

SEQ ID NO: 278410 - protein, 15 aa, Artificial Sequence
  Description of Artificial Sequence: Synthetic peptide
  Seed: HIHIFSFTGEEMATK
HIHFFSITTEEEATK

SEQ ID NO: 278411 - protein, 15 aa, Artificial Sequence
  Description of Artificial Sequence: Synthetic peptide
  Seed: HIHIFSFTGEEMATK
HIHFFSITTEEFATK

SEQ ID NO: 278412 - protein, 15 aa, Artificial Sequence
  Description of Artificial Sequence: Synthetic peptide
  Seed: HIHIFSFTGEEMATK
HIHFFSITTEEGATK

SEQ ID NO: 278413 - protein, 15 aa, Artificial Sequence
  Description of Artificial Sequence: Synthetic peptide
  Seed: HIHIFSFTGEEMATK
HIHFFSITTEEHATK

SEQ ID NO: 278414 - protein, 15 aa, Artificial Sequence
  Description of Artificial Sequence: Synthetic peptide
  Seed: HIHIFSFTGEEMATK
HIHFFSITTEEIATK

SEQ ID NO: 278415 - protein, 15 aa, Artificial Sequence
  Description of Artificial Sequence: Synthetic peptide
  Seed: HIHIFSFTGEEMATK
HIHFFSITTEELATK

SEQ ID NO: 278416 - protein, 15 aa, Artificial Sequence
  Description of Artificial Sequence: Synthetic peptide
  Seed: HIHIFSFTGEEMATK
HIHFFSITTEEMATK

SEQ ID NO: 278417 - protein, 15 aa, Artificial Sequence
  Description of Artificial Sequence: Synthetic peptide
  Seed: HIHIFSFTGEEMATK
HIHFFSITTEENATK

SEQ ID NO: 278418 - protein, 15 aa, Artificial Sequence
  Description of Artificial Sequence: Synthetic peptide
  Seed: HIHIFSFTGEEMATK
HIHFFSITTEEPATK

SEQ ID NO: 278419 - protein, 15 aa, Artificial Sequence
  Description of Artificial Sequence: Synthetic peptide
  Seed: HIHIFSFTGEEMATK
HIHFFSITTEEQATK

SEQ ID NO: 278420 - protein, 15 aa, Artificial Sequence
  Description of Artificial Sequence: Synthetic peptide
  Seed: HIHIFSFTGEEMATK
HIHFFSITTEESATK

SEQ ID NO: 278421 - protein, 15 aa, Artificial Sequence
  Description of Artificial Sequence: Synthetic peptide
  Seed: HIHIFSFTGEEMATK
HIHFFSITTEETATK

SEQ ID NO: 278422 - protein, 15 aa, Artificial Sequence
  Description of Artificial Sequence: Synthetic peptide
  Seed: HIHIFSFTGEEMATK
HIHFFSITTEEVATK

SEQ ID NO: 278423 - protein, 15 aa, Artificial Sequence
  Description of Artificial Sequence: Synthetic peptide
  Seed: HIHIFSFTGEEMATK
HIHFFSITTEEYATK

SEQ ID NO: 278424 - protein, 15 aa, Artificial Sequence
  Description of Artificial Sequence: Synthetic peptide
  Seed: HIHIFSFTGEEMATK
HIHFFSITVEEAATK

SEQ ID NO: 278425 - protein, 15 aa, Artificial Sequence
  Description of Artificial Sequence: Synthetic peptide
  Seed: HIHIFSFTGEEMATK
HIHFFSITVEEDATK

SEQ ID NO: 278426 - protein, 15 aa, Artificial Sequence
  Description of Artificial Sequence: Synthetic peptide
  Seed: HIHIFSFTGEEMATK
HIHFFSITVEEEATK

SEQ ID NO: 278427 - protein, 15 aa, Artificial Sequence
  Description of Artificial Sequence: Synthetic peptide
  Seed: HIHIFSFTGEEMATK
HIHFFSITVEEFATK

SEQ ID NO: 278428 - protein, 15 aa, Artificial Sequence
  Description of Artificial Sequence: Synthetic peptide
  Seed: HIHIFSFTGEEMATK
HIHFFSITVEEGATK

SEQ ID NO: 278429 - protein, 15 aa, Artificial Sequence
  Description of Artificial Sequence: Synthetic peptide
  Seed: HIHIFSFTGEEMATK
HIHFFSITVEEHATK

SEQ ID NO: 278430 - protein, 15 aa, Artificial Sequence
  Description of Artificial Sequence: Synthetic peptide
  Seed: HIHIFSFTGEEMATK
HIHFFSITVEEIATK

SEQ ID NO: 278431 - protein, 15 aa, Artificial Sequence
  Description of Artificial Sequence: Synthetic peptide
  Seed: HIHIFSFTGEEMATK
HIHFFSITVEEKATK

SEQ ID NO: 278432 - protein, 15 aa, Artificial Sequence
  Description of Artificial Sequence: Synthetic peptide
  Seed: HIHIFSFTGEEMATK
HIHFFSITVEEMATK

SEQ ID NO: 278433 - protein, 15 aa, Artificial Sequence
  Description of Artificial Sequence: Synthetic peptide
  Seed: HIHIFSFTGEEMATK
HIHFFSITVEENATK

SEQ ID NO: 278434 - protein, 15 aa, Artificial Sequence
  Description of Artificial Sequence: Synthetic peptide
  Seed: HIHIFSFTGEEMATK
HIHFFSITVEEPATK

SEQ ID NO: 278435 - protein, 15 aa, Artificial Sequence
  Description of Artificial Sequence: Synthetic peptide
  Seed: HIHIFSFTGEEMATK
HIHFFSITVEEQATK

SEQ ID NO: 278436 - protein, 15 aa, Artificial Sequence
  Description of Artificial Sequence: Synthetic peptide
  Seed: HIHIFSFTGEEMATK
HIHFFSITVEESATK

SEQ ID NO: 278437 - protein, 15 aa, Artificial Sequence
  Description of Artificial Sequence: Synthetic peptide
  Seed: HIHIFSFTGEEMATK
HIHFFSITVEETATK

SEQ ID NO: 278438 - protein, 15 aa, Artificial Sequence
  Description of Artificial Sequence: Synthetic peptide
  Seed: HIHIFSFTGEEMATK
HIHFFSITVEEVATK

SEQ ID NO: 278439 - protein, 15 aa, Artificial Sequence
  Description of Artificial Sequence: Synthetic peptide
  Seed: HIHIFSFTGEEMATK
HIHFFSITVEEYATK

SEQ ID NO: 278440 - protein, 15 aa, Artificial Sequence
  Description of Artificial Sequence: Synthetic peptide
  Seed: HIHIFSFTGEEMATK
HIHFFSITWEEAATK

SEQ ID NO: 278441 - protein, 15 aa, Artificial Sequence
  Description of Artificial Sequence: Synthetic peptide
  Seed: HIHIFSFTGEEMATK
HIHFFSITWEEDATK

SEQ ID NO: 278442 - protein, 15 aa, Artificial Sequence
  Description of Artificial Sequence: Synthetic peptide
  Seed: HIHIFSFTGEEMATK
HIHFFSITWEEEATK

SEQ ID NO: 278443 - protein, 15 aa, Artificial Sequence
  Description of Artificial Sequence: Synthetic peptide
  Seed: HIHIFSFTGEEMATK
HIHFFSITWEEFATK

SEQ ID NO: 278444 - protein, 15 aa, Artificial Sequence
  Description of Artificial Sequence: Synthetic peptide
  Seed: HIHIFSFTGEEMATK
HIHFFSITWEEHATK

SEQ ID NO: 278445 - protein, 15 aa, Artificial Sequence
  Description of Artificial Sequence: Synthetic peptide
  Seed: HIHIFSFTGEEMATK
HIHFFSITWEEIATK

SEQ ID NO: 278446 - protein, 15 aa, Artificial Sequence
  Description of Artificial Sequence: Synthetic peptide
  Seed: HIHIFSFTGEEMATK
HIHFFSITWEELATK

SEQ ID NO: 278447 - protein, 15 aa, Artificial Sequence
  Description of Artificial Sequence: Synthetic peptide
  Seed: HIHIFSFTGEEMATK
HIHFFSITWEEMATK

SEQ ID NO: 278448 - protein, 15 aa, Artificial Sequence
  Description of Artificial Sequence: Synthetic peptide
  Seed: HIHIFSFTGEEMATK
HIHFFSITWEENATK

SEQ ID NO: 278449 - protein, 15 aa, Artificial Sequence
  Description of Artificial Sequence: Synthetic peptide
  Seed: HIHIFSFTGEEMATK
HIHFFSITWEEPATK

SEQ ID NO: 278450 - protein, 15 aa, Artificial Sequence
  Description of Artificial Sequence: Synthetic peptide
  Seed: HIHIFSFTGEEMATK
HIHFFSITWEEQATK

SEQ ID NO: 278451 - protein, 15 aa, Artificial Sequence
  Description of Artificial Sequence: Synthetic peptide
  Seed: HIHIFSFTGEEMATK
HIHFFSITWEERATK

SEQ ID NO: 278452 - protein, 15 aa, Artificial Sequence
  Description of Artificial Sequence: Synthetic peptide
  Seed: HIHIFSFTGEEMATK
HIHFFSITWEESATK

SEQ ID NO: 278453 - protein, 15 aa, Artificial Sequence
  Description of Artificial Sequence: Synthetic peptide
  Seed: HIHIFSFTGEEMATK
HIHFFSITWEETATK

SEQ ID NO: 278454 - protein, 15 aa, Artificial Sequence
  Description of Artificial Sequence: Synthetic peptide
  Seed: HIHIFSFTGEEMATK
HIHFFSITWEEVATK

SEQ ID NO: 278455 - protein, 15 aa, Artificial Sequence
  Description of Artificial Sequence: Synthetic peptide
  Seed: HIHIFSFTGEEMATK
HIHFFSITWEEWATK

SEQ ID NO: 278456 - protein, 15 aa, Artificial Sequence
  Description of Artificial Sequence: Synthetic peptide
  Seed: HIHIFSFTGEEMATK
HIHFFSITWEEYATK

SEQ ID NO: 278457 - protein, 15 aa, Artificial Sequence
  Description of Artificial Sequence: Synthetic peptide
  Seed: HIHIFSFTGEEMATK
HIHFFSITYEEAATK

SEQ ID NO: 278458 - protein, 15 aa, Artificial Sequence
  Description of Artificial Sequence: Synthetic peptide
  Seed: HIHIFSFTGEEMATK
HIHFFSITYEEDATK

SEQ ID NO: 278459 - protein, 15 aa, Artificial Sequence
  Description of Artificial Sequence: Synthetic peptide
  Seed: HIHIFSFTGEEMATK
HIHFFSITYEEEATK

SEQ ID NO: 278460 - protein, 15 aa, Artificial Sequence
  Description of Artificial Sequence: Synthetic peptide
  Seed: HIHIFSFTGEEMATK
HIHFFSITYEEFATK

SEQ ID NO: 278461 - protein, 15 aa, Artificial Sequence
  Description of Artificial Sequence: Synthetic peptide
  Seed: HIHIFSFTGEEMATK
HIHFFSITYEEHATK

SEQ ID NO: 278462 - protein, 15 aa, Artificial Sequence
  Description of Artificial Sequence: Synthetic peptide
  Seed: HIHIFSFTGEEMATK
HIHFFSITYEEIATK

SEQ ID NO: 278463 - protein, 15 aa, Artificial Sequence
  Description of Artificial Sequence: Synthetic peptide
  Seed: HIHIFSFTGEEMATK
HIHFFSITYEELATK

SEQ ID NO: 278464 - protein, 15 aa, Artificial Sequence
  Description of Artificial Sequence: Synthetic peptide
  Seed: HIHIFSFTGEEMATK
HIHFFSITYEEMATK

SEQ ID NO: 278465 - protein, 15 aa, Artificial Sequence
  Description of Artificial Sequence: Synthetic peptide
  Seed: HIHIFSFTGEEMATK
HIHFFSITYEENATK

SEQ ID NO: 278466 - protein, 15 aa, Artificial Sequence
  Description of Artificial Sequence: Synthetic peptide
  Seed: HIHIFSFTGEEMATK
HIHFFSITYEEPATK

SEQ ID NO: 278467 - protein, 15 aa, Artificial Sequence
  Description of Artificial Sequence: Synthetic peptide
  Seed: HIHIFSFTGEEMATK
HIHFFSITYEEQATK

SEQ ID NO: 278468 - protein, 15 aa, Artificial Sequence
  Description of Artificial Sequence: Synthetic peptide
  Seed: HIHIFSFTGEEMATK
HIHFFSITYEERATK

SEQ ID NO: 278469 - protein, 15 aa, Artificial Sequence
  Description of Artificial Sequence: Synthetic peptide
  Seed: HIHIFSFTGEEMATK
HIHFFSITYEESATK

SEQ ID NO: 278470 - protein, 15 aa, Artificial Sequence
  Description of Artificial Sequence: Synthetic peptide
  Seed: HIHIFSFTGEEMATK
HIHFFSITYEETATK

SEQ ID NO: 278471 - protein, 15 aa, Artificial Sequence
  Description of Artificial Sequence: Synthetic peptide
  Seed: HIHIFSFTGEEMATK
HIHFFSITYEEVATK

SEQ ID NO: 278472 - protein, 15 aa, Artificial Sequence
  Description of Artificial Sequence: Synthetic peptide
  Seed: HIHIFSFTGEEMATK
HIHFFSITYEEWATK

SEQ ID NO: 278473 - protein, 15 aa, Artificial Sequence
  Description of Artificial Sequence: Synthetic peptide
  Seed: HIHIFSFTGEEMATK
HIHFFSITYEEYATK

SEQ ID NO: 278474 - protein, 15 aa, Artificial Sequence
  Description of Artificial Sequence: Synthetic peptide
  Seed: HIHIFSFTGEEMATK
HIHFFSKTAEELATK

SEQ ID NO: 278475 - protein, 15 aa, Artificial Sequence
  Description of Artificial Sequence: Synthetic peptide
  Seed: HIHIFSFTGEEMATK
HIHFFSKTFEEAATK

SEQ ID NO: 278476 - protein, 15 aa, Artificial Sequence
  Description of Artificial Sequence: Synthetic peptide
  Seed: HIHIFSFTGEEMATK
HIHFFSKTFEECATK

SEQ ID NO: 278477 - protein, 15 aa, Artificial Sequence
  Description of Artificial Sequence: Synthetic peptide
  Seed: HIHIFSFTGEEMATK
HIHFFSKTFEEDATK

SEQ ID NO: 278478 - protein, 15 aa, Artificial Sequence
  Description of Artificial Sequence: Synthetic peptide
  Seed: HIHIFSFTGEEMATK
HIHFFSKTFEEEATK

SEQ ID NO: 278479 - protein, 15 aa, Artificial Sequence
  Description of Artificial Sequence: Synthetic peptide
  Seed: HIHIFSFTGEEMATK
HIHFFSKTFEEFATK

SEQ ID NO: 278480 - protein, 15 aa, Artificial Sequence
  Description of Artificial Sequence: Synthetic peptide
  Seed: HIHIFSFTGEEMATK
HIHFFSKTFEEGATK

SEQ ID NO: 278481 - protein, 15 aa, Artificial Sequence
  Description of Artificial Sequence: Synthetic peptide
  Seed: HIHIFSFTGEEMATK
HIHFFSKTFEEHATK

SEQ ID NO: 278482 - protein, 15 aa, Artificial Sequence
  Description of Artificial Sequence: Synthetic peptide
  Seed: HIHIFSFTGEEMATK
HIHFFSKTFEEIATK

SEQ ID NO: 278483 - protein, 15 aa, Artificial Sequence
  Description of Artificial Sequence: Synthetic peptide
  Seed: HIHIFSFTGEEMATK
HIHFFSKTFEELATK

SEQ ID NO: 278484 - protein, 15 aa, Artificial Sequence
  Description of Artificial Sequence: Synthetic peptide
  Seed: HIHIFSFTGEEMATK
HIHFFSKTFEEMATK

SEQ ID NO: 278485 - protein, 15 aa, Artificial Sequence
  Description of Artificial Sequence: Synthetic peptide
  Seed: HIHIFSFTGEEMATK
HIHFFSKTFEENATK

SEQ ID NO: 278486 - protein, 15 aa, Artificial Sequence
  Description of Artificial Sequence: Synthetic peptide
  Seed: HIHIFSFTGEEMATK
HIHFFSKTFEEPATK

SEQ ID NO: 278487 - protein, 15 aa, Artificial Sequence
  Description of Artificial Sequence: Synthetic peptide
  Seed: HIHIFSFTGEEMATK
HIHFFSKTFEEQATK

SEQ ID NO: 278488 - protein, 15 aa, Artificial Sequence
  Description of Artificial Sequence: Synthetic peptide
  Seed: HIHIFSFTGEEMATK
HIHFFSKTFEESATK

SEQ ID NO: 278489 - protein, 15 aa, Artificial Sequence
  Description of Artificial Sequence: Synthetic peptide
  Seed: HIHIFSFTGEEMATK
HIHFFSKTFEETATK

SEQ ID NO: 278490 - protein, 15 aa, Artificial Sequence
  Description of Artificial Sequence: Synthetic peptide
  Seed: HIHIFSFTGEEMATK
HIHFFSKTFEEVATK

SEQ ID NO: 278491 - protein, 15 aa, Artificial Sequence
  Description of Artificial Sequence: Synthetic peptide
  Seed: HIHIFSFTGEEMATK
HIHFFSKTFEEWATK

SEQ ID NO: 278492 - protein, 15 aa, Artificial Sequence
  Description of Artificial Sequence: Synthetic peptide
  Seed: HIHIFSFTGEEMATK
HIHFFSKTFEEYATK

SEQ ID NO: 278493 - protein, 15 aa, Artificial Sequence
  Description of Artificial Sequence: Synthetic peptide
  Seed: HIHIFSFTGEEMATK
HIHFFSKTIEEFATK

SEQ ID NO: 278494 - protein, 15 aa, Artificial Sequence
  Description of Artificial Sequence: Synthetic peptide
  Seed: HIHIFSFTGEEMATK
HIHFFSKTIEEIATK

SEQ ID NO: 278495 - protein, 15 aa, Artificial Sequence
  Description of Artificial Sequence: Synthetic peptide
  Seed: HIHIFSFTGEEMATK
HIHFFSKTIEELATK

SEQ ID NO: 278496 - protein, 15 aa, Artificial Sequence
  Description of Artificial Sequence: Synthetic peptide
  Seed: HIHIFSFTGEEMATK
HIHFFSKTIEEMATK

SEQ ID NO: 278497 - protein, 15 aa, Artificial Sequence
  Description of Artificial Sequence: Synthetic peptide
  Seed: HIHIFSFTGEEMATK
HIHFFSKTIEEVATK

SEQ ID NO: 278498 - protein, 15 aa, Artificial Sequence
  Description of Artificial Sequence: Synthetic peptide
  Seed: HIHIFSFTGEEMATK
HIHFFSKTLEEFATK

SEQ ID NO: 278499 - protein, 15 aa, Artificial Sequence
  Description of Artificial Sequence: Synthetic peptide
  Seed: HIHIFSFTGEEMATK
HIHFFSKTLEEIATK

SEQ ID NO: 278500 - protein, 15 aa, Artificial Sequence
  Description of Artificial Sequence: Synthetic peptide
  Seed: HIHIFSFTGEEMATK
HIHFFSKTLEELATK

SEQ ID NO: 278501 - protein, 15 aa, Artificial Sequence
  Description of Artificial Sequence: Synthetic peptide
  Seed: HIHIFSFTGEEMATK
HIHFFSKTLEEMATK

SEQ ID NO: 278502 - protein, 15 aa, Artificial Sequence
  Description of Artificial Sequence: Synthetic peptide
  Seed: HIHIFSFTGEEMATK
HIHFFSKTLEEVATK

SEQ ID NO: 278503 - protein, 15 aa, Artificial Sequence
  Description of Artificial Sequence: Synthetic peptide
  Seed: HIHIFSFTGEEMATK
HIHFFSKTMEEFATK

SEQ ID NO: 278504 - protein, 15 aa, Artificial Sequence
  Description of Artificial Sequence: Synthetic peptide
  Seed: HIHIFSFTGEEMATK
HIHFFSKTMEEIATK

SEQ ID NO: 278505 - protein, 15 aa, Artificial Sequence
  Description of Artificial Sequence: Synthetic peptide
  Seed: HIHIFSFTGEEMATK
HIHFFSKTMEELATK

SEQ ID NO: 278506 - protein, 15 aa, Artificial Sequence
  Description of Artificial Sequence: Synthetic peptide
  Seed: HIHIFSFTGEEMATK
HIHFFSKTMEEMATK

SEQ ID NO: 278507 - protein, 15 aa, Artificial Sequence
  Description of Artificial Sequence: Synthetic peptide
  Seed: HIHIFSFTGEEMATK
HIHFFSKTMEEVATK

SEQ ID NO: 278508 - protein, 15 aa, Artificial Sequence
  Description of Artificial Sequence: Synthetic peptide
  Seed: HIHIFSFTGEEMATK
HIHFFSKTVEEIATK

SEQ ID NO: 278509 - protein, 15 aa, Artificial Sequence
  Description of Artificial Sequence: Synthetic peptide
  Seed: HIHIFSFTGEEMATK
HIHFFSKTVEELATK

SEQ ID NO: 278510 - protein, 15 aa, Artificial Sequence
  Description of Artificial Sequence: Synthetic peptide
  Seed: HIHIFSFTGEEMATK
HIHFFSKTWEEFATK

SEQ ID NO: 278511 - protein, 15 aa, Artificial Sequence
  Description of Artificial Sequence: Synthetic peptide
  Seed: HIHIFSFTGEEMATK
HIHFFSKTWEEIATK

SEQ ID NO: 278512 - protein, 15 aa, Artificial Sequence
  Description of Artificial Sequence: Synthetic peptide
  Seed: HIHIFSFTGEEMATK
HIHFFSKTWEELATK

SEQ ID NO: 278513 - protein, 15 aa, Artificial Sequence
  Description of Artificial Sequence: Synthetic peptide
  Seed: HIHIFSFTGEEMATK
HIHFFSKTWEEMATK

SEQ ID NO: 278514 - protein, 15 aa, Artificial Sequence
  Description of Artificial Sequence: Synthetic peptide
  Seed: HIHIFSFTGEEMATK
HIHFFSKTWEEVATK

SEQ ID NO: 278515 - protein, 15 aa, Artificial Sequence
  Description of Artificial Sequence: Synthetic peptide
  Seed: HIHIFSFTGEEMATK
HIHFFSKTYEEFATK

SEQ ID NO: 278516 - protein, 15 aa, Artificial Sequence
  Description of Artificial Sequence: Synthetic peptide
  Seed: HIHIFSFTGEEMATK
HIHFFSKTYEEIATK

SEQ ID NO: 278517 - protein, 15 aa, Artificial Sequence
  Description of Artificial Sequence: Synthetic peptide
  Seed: HIHIFSFTGEEMATK
HIHFFSKTYEELATK

SEQ ID NO: 278518 - protein, 15 aa, Artificial Sequence
  Description of Artificial Sequence: Synthetic peptide
  Seed: HIHIFSFTGEEMATK
HIHFFSKTYEEMATK

SEQ ID NO: 278519 - protein, 15 aa, Artificial Sequence
  Description of Artificial Sequence: Synthetic peptide
  Seed: HIHIFSFTGEEMATK
HIHFFSKTYEEVATK

SEQ ID NO: 278520 - protein, 15 aa, Artificial Sequence
  Description of Artificial Sequence: Synthetic peptide
  Seed: HIHIFSFTGEEMATK
HIHFFSLTAEEAATK

SEQ ID NO: 278521 - protein, 15 aa, Artificial Sequence
  Description of Artificial Sequence: Synthetic peptide
  Seed: HIHIFSFTGEEMATK
HIHFFSLTAEECATK

SEQ ID NO: 278522 - protein, 15 aa, Artificial Sequence
  Description of Artificial Sequence: Synthetic peptide
  Seed: HIHIFSFTGEEMATK
HIHFFSLTAEEDATK

SEQ ID NO: 278523 - protein, 15 aa, Artificial Sequence
  Description of Artificial Sequence: Synthetic peptide
  Seed: HIHIFSFTGEEMATK
HIHFFSLTAEEEATK

SEQ ID NO: 278524 - protein, 15 aa, Artificial Sequence
  Description of Artificial Sequence: Synthetic peptide
  Seed: HIHIFSFTGEEMATK
HIHFFSLTAEEFATK

SEQ ID NO: 278525 - protein, 15 aa, Artificial Sequence
  Description of Artificial Sequence: Synthetic peptide
  Seed: HIHIFSFTGEEMATK
HIHFFSLTAEEGATK

SEQ ID NO: 278526 - protein, 15 aa, Artificial Sequence
  Description of Artificial Sequence: Synthetic peptide
  Seed: HIHIFSFTGEEMATK
HIHFFSLTAEEHATK

SEQ ID NO: 278527 - protein, 15 aa, Artificial Sequence
  Description of Artificial Sequence: Synthetic peptide
  Seed: HIHIFSFTGEEMATK
HIHFFSLTAEEIATK

SEQ ID NO: 278528 - protein, 15 aa, Artificial Sequence
  Description of Artificial Sequence: Synthetic peptide
  Seed: HIHIFSFTGEEMATK
HIHFFSLTAEEKATK

SEQ ID NO: 278529 - protein, 15 aa, Artificial Sequence
  Description of Artificial Sequence: Synthetic peptide
  Seed: HIHIFSFTGEEMATK
HIHFFSLTAEELATK

SEQ ID NO: 278530 - protein, 15 aa, Artificial Sequence
  Description of Artificial Sequence: Synthetic peptide
  Seed: HIHIFSFTGEEMATK
HIHFFSLTAEEMATK

SEQ ID NO: 278531 - protein, 15 aa, Artificial Sequence
  Description of Artificial Sequence: Synthetic peptide
  Seed: HIHIFSFTGEEMATK
HIHFFSLTAEENATK

SEQ ID NO: 278532 - protein, 15 aa, Artificial Sequence
  Description of Artificial Sequence: Synthetic peptide
  Seed: HIHIFSFTGEEMATK
HIHFFSLTAEEPATK

SEQ ID NO: 278533 - protein, 15 aa, Artificial Sequence
  Description of Artificial Sequence: Synthetic peptide
  Seed: HIHIFSFTGEEMATK
HIHFFSLTAEEQATK

SEQ ID NO: 278534 - protein, 15 aa, Artificial Sequence
  Description of Artificial Sequence: Synthetic peptide
  Seed: HIHIFSFTGEEMATK
HIHFFSLTAEERATK

SEQ ID NO: 278535 - protein, 15 aa, Artificial Sequence
  Description of Artificial Sequence: Synthetic peptide
  Seed: HIHIFSFTGEEMATK
HIHFFSLTAEESATK

SEQ ID NO: 278536 - protein, 15 aa, Artificial Sequence
  Description of Artificial Sequence: Synthetic peptide
  Seed: HIHIFSFTGEEMATK
HIHFFSLTAEETATK

SEQ ID NO: 278537 - protein, 15 aa, Artificial Sequence
  Description of Artificial Sequence: Synthetic peptide
  Seed: HIHIFSFTGEEMATK
HIHFFSLTAEEVATK

SEQ ID NO: 278538 - protein, 15 aa, Artificial Sequence
  Description of Artificial Sequence: Synthetic peptide
  Seed: HIHIFSFTGEEMATK
HIHFFSLTAEEWATK

SEQ ID NO: 278539 - protein, 15 aa, Artificial Sequence
  Description of Artificial Sequence: Synthetic peptide
  Seed: HIHIFSFTGEEMATK
HIHFFSLTAEEYATK

SEQ ID NO: 278540 - protein, 15 aa, Artificial Sequence
  Description of Artificial Sequence: Synthetic peptide
  Seed: HIHIFSFTGEEMATK
HIHFFSLTCEEAATK

SEQ ID NO: 278541 - protein, 15 aa, Artificial Sequence
  Description of Artificial Sequence: Synthetic peptide
  Seed: HIHIFSFTGEEMATK
HIHFFSLTFEEAATK

SEQ ID NO: 278542 - protein, 15 aa, Artificial Sequence
  Description of Artificial Sequence: Synthetic peptide
  Seed: HIHIFSFTGEEMATK
HIHFFSLTFEECATK

SEQ ID NO: 278543 - protein, 15 aa, Artificial Sequence
  Description of Artificial Sequence: Synthetic peptide
  Seed: HIHIFSFTGEEMATK
HIHFFSLTFEEDATK

SEQ ID NO: 278544 - protein, 15 aa, Artificial Sequence
  Description of Artificial Sequence: Synthetic peptide
  Seed: HIHIFSFTGEEMATK
HIHFFSLTFEEEATK

SEQ ID NO: 278545 - protein, 15 aa, Artificial Sequence
  Description of Artificial Sequence: Synthetic peptide
  Seed: HIHIFSFTGEEMATK
HIHFFSLTFEEFATK

SEQ ID NO: 278546 - protein, 15 aa, Artificial Sequence
  Description of Artificial Sequence: Synthetic peptide
  Seed: HIHIFSFTGEEMATK
HIHFFSLTFEEGATK

SEQ ID NO: 278547 - protein, 15 aa, Artificial Sequence
  Description of Artificial Sequence: Synthetic peptide
  Seed: HIHIFSFTGEEMATK
HIHFFSLTFEEHATK

SEQ ID NO: 278548 - protein, 15 aa, Artificial Sequence
  Description of Artificial Sequence: Synthetic peptide
  Seed: HIHIFSFTGEEMATK
HIHFFSLTFEEIATK

SEQ ID NO: 278549 - protein, 15 aa, Artificial Sequence
  Description of Artificial Sequence: Synthetic peptide
  Seed: HIHIFSFTGEEMATK
HIHFFSLTFEEKATK

SEQ ID NO: 278550 - protein, 15 aa, Artificial Sequence
  Description of Artificial Sequence: Synthetic peptide
  Seed: HIHIFSFTGEEMATK
HIHFFSLTFEELATK

SEQ ID NO: 278551 - protein, 15 aa, Artificial Sequence
  Description of Artificial Sequence: Synthetic peptide
  Seed: HIHIFSFTGEEMATK
HIHFFSLTFEEMATK

SEQ ID NO: 278552 - protein, 15 aa, Artificial Sequence
  Description of Artificial Sequence: Synthetic peptide
  Seed: HIHIFSFTGEEMATK
HIHFFSLTFEENATK

SEQ ID NO: 278553 - protein, 15 aa, Artificial Sequence
  Description of Artificial Sequence: Synthetic peptide
  Seed: HIHIFSFTGEEMATK
HIHFFSLTFEEPATK

SEQ ID NO: 278554 - protein, 15 aa, Artificial Sequence
  Description of Artificial Sequence: Synthetic peptide
  Seed: HIHIFSFTGEEMATK
HIHFFSLTFEEQATK

SEQ ID NO: 278555 - protein, 15 aa, Artificial Sequence
  Description of Artificial Sequence: Synthetic peptide
  Seed: HIHIFSFTGEEMATK
HIHFFSLTFEERATK

SEQ ID NO: 278556 - protein, 15 aa, Artificial Sequence
  Description of Artificial Sequence: Synthetic peptide
  Seed: HIHIFSFTGEEMATK
HIHFFSLTFEESATK

SEQ ID NO: 278557 - protein, 15 aa, Artificial Sequence
  Description of Artificial Sequence: Synthetic peptide
  Seed: HIHIFSFTGEEMATK
HIHFFSLTFEETATK

SEQ ID NO: 278558 - protein, 15 aa, Artificial Sequence
  Description of Artificial Sequence: Synthetic peptide
  Seed: HIHIFSFTGEEMATK
HIHFFSLTFEEVATK

SEQ ID NO: 278559 - protein, 15 aa, Artificial Sequence
  Description of Artificial Sequence: Synthetic peptide
  Seed: HIHIFSFTGEEMATK
HIHFFSLTFEEWATK

SEQ ID NO: 278560 - protein, 15 aa, Artificial Sequence
  Description of Artificial Sequence: Synthetic peptide
  Seed: HIHIFSFTGEEMATK
HIHFFSLTFEEYATK

SEQ ID NO: 278561 - protein, 15 aa, Artificial Sequence
  Description of Artificial Sequence: Synthetic peptide
  Seed: HIHIFSFTGEEMATK
HIHFFSLTGEEAATK

SEQ ID NO: 278562 - protein, 15 aa, Artificial Sequence
  Description of Artificial Sequence: Synthetic peptide
  Seed: HIHIFSFTGEEMATK
HIHFFSLTGEECATK

SEQ ID NO: 278563 - protein, 15 aa, Artificial Sequence
  Description of Artificial Sequence: Synthetic peptide
  Seed: HIHIFSFTGEEMATK
HIHFFSLTGEEDATK

SEQ ID NO: 278564 - protein, 15 aa, Artificial Sequence
  Description of Artificial Sequence: Synthetic peptide
  Seed: HIHIFSFTGEEMATK
HIHFFSLTGEEEATK

SEQ ID NO: 278565 - protein, 15 aa, Artificial Sequence
  Description of Artificial Sequence: Synthetic peptide
  Seed: HIHIFSFTGEEMATK
HIHFFSLTGEEFATK

SEQ ID NO: 278566 - protein, 15 aa, Artificial Sequence
  Description of Artificial Sequence: Synthetic peptide
  Seed: HIHIFSFTGEEMATK
HIHFFSLTGEEGATK

SEQ ID NO: 278567 - protein, 15 aa, Artificial Sequence
  Description of Artificial Sequence: Synthetic peptide
  Seed: HIHIFSFTGEEMATK
HIHFFSLTGEEHATK

SEQ ID NO: 278568 - protein, 15 aa, Artificial Sequence
  Description of Artificial Sequence: Synthetic peptide
  Seed: HIHIFSFTGEEMATK
HIHFFSLTGEEIATK

SEQ ID NO: 278569 - protein, 15 aa, Artificial Sequence
  Description of Artificial Sequence: Synthetic peptide
  Seed: HIHIFSFTGEEMATK
HIHFFSLTGEEKATK

SEQ ID NO: 278570 - protein, 15 aa, Artificial Sequence
  Description of Artificial Sequence: Synthetic peptide
  Seed: HIHIFSFTGEEMATK
HIHFFSLTGEELATK

SEQ ID NO: 278571 - protein, 15 aa, Artificial Sequence
  Description of Artificial Sequence: Synthetic peptide
  Seed: HIHIFSFTGEEMATK
HIHFFSLTGEEMATK

SEQ ID NO: 278572 - protein, 15 aa, Artificial Sequence
  Description of Artificial Sequence: Synthetic peptide
  Seed: HIHIFSFTGEEMATK
HIHFFSLTGEENATK

SEQ ID NO: 278573 - protein, 15 aa, Artificial Sequence
  Description of Artificial Sequence: Synthetic peptide
  Seed: HIHIFSFTGEEMATK
HIHFFSLTGEEPATK

SEQ ID NO: 278574 - protein, 15 aa, Artificial Sequence
  Description of Artificial Sequence: Synthetic peptide
  Seed: HIHIFSFTGEEMATK
HIHFFSLTGEEQATK

SEQ ID NO: 278575 - protein, 15 aa, Artificial Sequence
  Description of Artificial Sequence: Synthetic peptide
  Seed: HIHIFSFTGEEMATK
HIHFFSLTGEERATK

SEQ ID NO: 278576 - protein, 15 aa, Artificial Sequence
  Description of Artificial Sequence: Synthetic peptide
  Seed: HIHIFSFTGEEMATK
HIHFFSLTGEESATK

SEQ ID NO: 278577 - protein, 15 aa, Artificial Sequence
  Description of Artificial Sequence: Synthetic peptide
  Seed: HIHIFSFTGEEMATK
HIHFFSLTGEETATK

SEQ ID NO: 278578 - protein, 15 aa, Artificial Sequence
  Description of Artificial Sequence: Synthetic peptide
  Seed: HIHIFSFTGEEMATK
HIHFFSLTGEEVATK

SEQ ID NO: 278579 - protein, 15 aa, Artificial Sequence
  Description of Artificial Sequence: Synthetic peptide
  Seed: HIHIFSFTGEEMATK
HIHFFSLTGEEWATK

SEQ ID NO: 278580 - protein, 15 aa, Artificial Sequence
  Description of Artificial Sequence: Synthetic peptide
  Seed: HIHIFSFTGEEMATK
HIHFFSLTGEEYATK

SEQ ID NO: 278581 - protein, 15 aa, Artificial Sequence
  Description of Artificial Sequence: Synthetic peptide
  Seed: HIHIFSFTGEEMATK
HIHFFSLTHEEAATK

SEQ ID NO: 278582 - protein, 15 aa, Artificial Sequence
  Description of Artificial Sequence: Synthetic peptide
  Seed: HIHIFSFTGEEMATK
HIHFFSLTHEEIATK

SEQ ID NO: 278583 - protein, 15 aa, Artificial Sequence
  Description of Artificial Sequence: Synthetic peptide
  Seed: HIHIFSFTGEEMATK
HIHFFSLTHEELATK

SEQ ID NO: 278584 - protein, 15 aa, Artificial Sequence
  Description of Artificial Sequence: Synthetic peptide
  Seed: HIHIFSFTGEEMATK
HIHFFSLTHEEMATK

SEQ ID NO: 278585 - protein, 15 aa, Artificial Sequence
  Description of Artificial Sequence: Synthetic peptide
  Seed: HIHIFSFTGEEMATK
HIHFFSLTHEESATK

SEQ ID NO: 278586 - protein, 15 aa, Artificial Sequence
  Description of Artificial Sequence: Synthetic peptide
  Seed: HIHIFSFTGEEMATK
HIHFFSLTHEEVATK

SEQ ID NO: 278587 - protein, 15 aa, Artificial Sequence
  Description of Artificial Sequence: Synthetic peptide
  Seed: HIHIFSFTGEEMATK
HIHFFSLTIEEAATK

SEQ ID NO: 278588 - protein, 15 aa, Artificial Sequence
  Description of Artificial Sequence: Synthetic peptide
  Seed: HIHIFSFTGEEMATK
HIHFFSLTIEECATK

SEQ ID NO: 278589 - protein, 15 aa, Artificial Sequence
  Description of Artificial Sequence: Synthetic peptide
  Seed: HIHIFSFTGEEMATK
HIHFFSLTIEEDATK

SEQ ID NO: 278590 - protein, 15 aa, Artificial Sequence
  Description of Artificial Sequence: Synthetic peptide
  Seed: HIHIFSFTGEEMATK
HIHFFSLTIEEEATK

SEQ ID NO: 278591 - protein, 15 aa, Artificial Sequence
  Description of Artificial Sequence: Synthetic peptide
  Seed: HIHIFSFTGEEMATK
HIHFFSLTIEEFATK

SEQ ID NO: 278592 - protein, 15 aa, Artificial Sequence
  Description of Artificial Sequence: Synthetic peptide
  Seed: HIHIFSFTGEEMATK
HIHFFSLTIEEGATK

SEQ ID NO: 278593 - protein, 15 aa, Artificial Sequence
  Description of Artificial Sequence: Synthetic peptide
  Seed: HIHIFSFTGEEMATK
HIHFFSLTIEEHATK

SEQ ID NO: 278594 - protein, 15 aa, Artificial Sequence
  Description of Artificial Sequence: Synthetic peptide
  Seed: HIHIFSFTGEEMATK
HIHFFSLTIEEIATK

SEQ ID NO: 278595 - protein, 15 aa, Artificial Sequence
  Description of Artificial Sequence: Synthetic peptide
  Seed: HIHIFSFTGEEMATK
HIHFFSLTIEEKATK

SEQ ID NO: 278596 - protein, 15 aa, Artificial Sequence
  Description of Artificial Sequence: Synthetic peptide
  Seed: HIHIFSFTGEEMATK
HIHFFSLTIEELATK

SEQ ID NO: 278597 - protein, 15 aa, Artificial Sequence
  Description of Artificial Sequence: Synthetic peptide
  Seed: HIHIFSFTGEEMATK
HIHFFSLTIEEMATK

SEQ ID NO: 278598 - protein, 15 aa, Artificial Sequence
  Description of Artificial Sequence: Synthetic peptide
  Seed: HIHIFSFTGEEMATK
HIHFFSLTIEENATK

SEQ ID NO: 278599 - protein, 15 aa, Artificial Sequence
  Description of Artificial Sequence: Synthetic peptide
  Seed: HIHIFSFTGEEMATK
HIHFFSLTIEEPATK

SEQ ID NO: 278600 - protein, 15 aa, Artificial Sequence
  Description of Artificial Sequence: Synthetic peptide
  Seed: HIHIFSFTGEEMATK
HIHFFSLTIEEQATK

SEQ ID NO: 278601 - protein, 15 aa, Artificial Sequence
  Description of Artificial Sequence: Synthetic peptide
  Seed: HIHIFSFTGEEMATK
HIHFFSLTIEERATK

SEQ ID NO: 278602 - protein, 15 aa, Artificial Sequence
  Description of Artificial Sequence: Synthetic peptide
  Seed: HIHIFSFTGEEMATK
HIHFFSLTIEESATK

SEQ ID NO: 278603 - protein, 15 aa, Artificial Sequence
  Description of Artificial Sequence: Synthetic peptide
  Seed: HIHIFSFTGEEMATK
HIHFFSLTIEETATK

SEQ ID NO: 278604 - protein, 15 aa, Artificial Sequence
  Description of Artificial Sequence: Synthetic peptide
  Seed: HIHIFSFTGEEMATK
HIHFFSLTIEEVATK

SEQ ID NO: 278605 - protein, 15 aa, Artificial Sequence
  Description of Artificial Sequence: Synthetic peptide
  Seed: HIHIFSFTGEEMATK
HIHFFSLTIEEYATK

SEQ ID NO: 278606 - protein, 15 aa, Artificial Sequence
  Description of Artificial Sequence: Synthetic peptide
  Seed: HIHIFSFTGEEMATK
HIHFFSLTLEEAATK

SEQ ID NO: 278607 - protein, 15 aa, Artificial Sequence
  Description of Artificial Sequence: Synthetic peptide
  Seed: HIHIFSFTGEEMATK
HIHFFSLTLEEDATK

SEQ ID NO: 278608 - protein, 15 aa, Artificial Sequence
  Description of Artificial Sequence: Synthetic peptide
  Seed: HIHIFSFTGEEMATK
HIHFFSLTLEEEATK

SEQ ID NO: 278609 - protein, 15 aa, Artificial Sequence
  Description of Artificial Sequence: Synthetic peptide
  Seed: HIHIFSFTGEEMATK
HIHFFSLTLEEFATK

SEQ ID NO: 278610 - protein, 15 aa, Artificial Sequence
  Description of Artificial Sequence: Synthetic peptide
  Seed: HIHIFSFTGEEMATK
HIHFFSLTLEEGATK

SEQ ID NO: 278611 - protein, 15 aa, Artificial Sequence
  Description of Artificial Sequence: Synthetic peptide
  Seed: HIHIFSFTGEEMATK
HIHFFSLTLEEHATK

SEQ ID NO: 278612 - protein, 15 aa, Artificial Sequence
  Description of Artificial Sequence: Synthetic peptide
  Seed: HIHIFSFTGEEMATK
HIHFFSLTLEEIATK

SEQ ID NO: 278613 - protein, 15 aa, Artificial Sequence
  Description of Artificial Sequence: Synthetic peptide
  Seed: HIHIFSFTGEEMATK
HIHFFSLTLEELATK

SEQ ID NO: 278614 - protein, 15 aa, Artificial Sequence
  Description of Artificial Sequence: Synthetic peptide
  Seed: HIHIFSFTGEEMATK
HIHFFSLTLEEMATK

SEQ ID NO: 278615 - protein, 15 aa, Artificial Sequence
  Description of Artificial Sequence: Synthetic peptide
  Seed: HIHIFSFTGEEMATK
HIHFFSLTLEENATK

SEQ ID NO: 278616 - protein, 15 aa, Artificial Sequence
  Description of Artificial Sequence: Synthetic peptide
  Seed: HIHIFSFTGEEMATK
HIHFFSLTLEEPATK

SEQ ID NO: 278617 - protein, 15 aa, Artificial Sequence
  Description of Artificial Sequence: Synthetic peptide
  Seed: HIHIFSFTGEEMATK
HIHFFSLTLEEQATK

SEQ ID NO: 278618 - protein, 15 aa, Artificial Sequence
  Description of Artificial Sequence: Synthetic peptide
  Seed: HIHIFSFTGEEMATK
HIHFFSLTLEERATK

SEQ ID NO: 278619 - protein, 15 aa, Artificial Sequence
  Description of Artificial Sequence: Synthetic peptide
  Seed: HIHIFSFTGEEMATK
HIHFFSLTLEESATK

SEQ ID NO: 278620 - protein, 15 aa, Artificial Sequence
  Description of Artificial Sequence: Synthetic peptide
  Seed: HIHIFSFTGEEMATK
HIHFFSLTLEETATK

SEQ ID NO: 278621 - protein, 15 aa, Artificial Sequence
  Description of Artificial Sequence: Synthetic peptide
  Seed: HIHIFSFTGEEMATK
HIHFFSLTLEEVATK

SEQ ID NO: 278622 - protein, 15 aa, Artificial Sequence
  Description of Artificial Sequence: Synthetic peptide
  Seed: HIHIFSFTGEEMATK
HIHFFSLTLEEYATK

SEQ ID NO: 278623 - protein, 15 aa, Artificial Sequence
  Description of Artificial Sequence: Synthetic peptide
  Seed: HIHIFSFTGEEMATK
HIHFFSLTMEEAATK

SEQ ID NO: 278624 - protein, 15 aa, Artificial Sequence
  Description of Artificial Sequence: Synthetic peptide
  Seed: HIHIFSFTGEEMATK
HIHFFSLTMEEEATK

SEQ ID NO: 278625 - protein, 15 aa, Artificial Sequence
  Description of Artificial Sequence: Synthetic peptide
  Seed: HIHIFSFTGEEMATK
HIHFFSLTMEEFATK

SEQ ID NO: 278626 - protein, 15 aa, Artificial Sequence
  Description of Artificial Sequence: Synthetic peptide
  Seed: HIHIFSFTGEEMATK
HIHFFSLTMEEGATK

SEQ ID NO: 278627 - protein, 15 aa, Artificial Sequence
  Description of Artificial Sequence: Synthetic peptide
  Seed: HIHIFSFTGEEMATK
HIHFFSLTMEEHATK

SEQ ID NO: 278628 - protein, 15 aa, Artificial Sequence
  Description of Artificial Sequence: Synthetic peptide
  Seed: HIHIFSFTGEEMATK
HIHFFSLTMEEIATK

SEQ ID NO: 278629 - protein, 15 aa, Artificial Sequence
  Description of Artificial Sequence: Synthetic peptide
  Seed: HIHIFSFTGEEMATK
HIHFFSLTMEELATK

SEQ ID NO: 278630 - protein, 15 aa, Artificial Sequence
  Description of Artificial Sequence: Synthetic peptide
  Seed: HIHIFSFTGEEMATK
HIHFFSLTMEEMATK

SEQ ID NO: 278631 - protein, 15 aa, Artificial Sequence
  Description of Artificial Sequence: Synthetic peptide
  Seed: HIHIFSFTGEEMATK
HIHFFSLTMEENATK

SEQ ID NO: 278632 - protein, 15 aa, Artificial Sequence
  Description of Artificial Sequence: Synthetic peptide
  Seed: HIHIFSFTGEEMATK
HIHFFSLTMEEPATK

SEQ ID NO: 278633 - protein, 15 aa, Artificial Sequence
  Description of Artificial Sequence: Synthetic peptide
  Seed: HIHIFSFTGEEMATK
HIHFFSLTMEEQATK

SEQ ID NO: 278634 - protein, 15 aa, Artificial Sequence
  Description of Artificial Sequence: Synthetic peptide
  Seed: HIHIFSFTGEEMATK
HIHFFSLTMEESATK

SEQ ID NO: 278635 - protein, 15 aa, Artificial Sequence
  Description of Artificial Sequence: Synthetic peptide
  Seed: HIHIFSFTGEEMATK
HIHFFSLTMEETATK

SEQ ID NO: 278636 - protein, 15 aa, Artificial Sequence
  Description of Artificial Sequence: Synthetic peptide
  Seed: HIHIFSFTGEEMATK
HIHFFSLTMEEVATK

SEQ ID NO: 278637 - protein, 15 aa, Artificial Sequence
  Description of Artificial Sequence: Synthetic peptide
  Seed: HIHIFSFTGEEMATK
HIHFFSLTMEEYATK

SEQ ID NO: 278638 - protein, 15 aa, Artificial Sequence
  Description of Artificial Sequence: Synthetic peptide
  Seed: HIHIFSFTGEEMATK
HIHFFSLTNEEAATK

SEQ ID NO: 278639 - protein, 15 aa, Artificial Sequence
  Description of Artificial Sequence: Synthetic peptide
  Seed: HIHIFSFTGEEMATK
HIHFFSLTNEEDATK

SEQ ID NO: 278640 - protein, 15 aa, Artificial Sequence
  Description of Artificial Sequence: Synthetic peptide
  Seed: HIHIFSFTGEEMATK
HIHFFSLTNEEEATK

SEQ ID NO: 278641 - protein, 15 aa, Artificial Sequence
  Description of Artificial Sequence: Synthetic peptide
  Seed: HIHIFSFTGEEMATK
HIHFFSLTNEEFATK

SEQ ID NO: 278642 - protein, 15 aa, Artificial Sequence
  Description of Artificial Sequence: Synthetic peptide
  Seed: HIHIFSFTGEEMATK
HIHFFSLTNEEGATK

SEQ ID NO: 278643 - protein, 15 aa, Artificial Sequence
  Description of Artificial Sequence: Synthetic peptide
  Seed: HIHIFSFTGEEMATK
HIHFFSLTNEEHATK

SEQ ID NO: 278644 - protein, 15 aa, Artificial Sequence
  Description of Artificial Sequence: Synthetic peptide
  Seed: HIHIFSFTGEEMATK
HIHFFSLTNEEIATK

SEQ ID NO: 278645 - protein, 15 aa, Artificial Sequence
  Description of Artificial Sequence: Synthetic peptide
  Seed: HIHIFSFTGEEMATK
HIHFFSLTNEELATK

SEQ ID NO: 278646 - protein, 15 aa, Artificial Sequence
  Description of Artificial Sequence: Synthetic peptide
  Seed: HIHIFSFTGEEMATK
HIHFFSLTNEEMATK

SEQ ID NO: 278647 - protein, 15 aa, Artificial Sequence
  Description of Artificial Sequence: Synthetic peptide
  Seed: HIHIFSFTGEEMATK
HIHFFSLTNEENATK

SEQ ID NO: 278648 - protein, 15 aa, Artificial Sequence
  Description of Artificial Sequence: Synthetic peptide
  Seed: HIHIFSFTGEEMATK
HIHFFSLTNEEPATK

SEQ ID NO: 278649 - protein, 15 aa, Artificial Sequence
  Description of Artificial Sequence: Synthetic peptide
  Seed: HIHIFSFTGEEMATK
HIHFFSLTNEEQATK

SEQ ID NO: 278650 - protein, 15 aa, Artificial Sequence
  Description of Artificial Sequence: Synthetic peptide
  Seed: HIHIFSFTGEEMATK
HIHFFSLTNEESATK

SEQ ID NO: 278651 - protein, 15 aa, Artificial Sequence
  Description of Artificial Sequence: Synthetic peptide
  Seed: HIHIFSFTGEEMATK
HIHFFSLTNEETATK

SEQ ID NO: 278652 - protein, 15 aa, Artificial Sequence
  Description of Artificial Sequence: Synthetic peptide
  Seed: HIHIFSFTGEEMATK
HIHFFSLTNEEVATK

SEQ ID NO: 278653 - protein, 15 aa, Artificial Sequence
  Description of Artificial Sequence: Synthetic peptide
  Seed: HIHIFSFTGEEMATK
HIHFFSLTPEEAATK

SEQ ID NO: 278654 - protein, 15 aa, Artificial Sequence
  Description of Artificial Sequence: Synthetic peptide
  Seed: HIHIFSFTGEEMATK
HIHFFSLTPEECATK

SEQ ID NO: 278655 - protein, 15 aa, Artificial Sequence
  Description of Artificial Sequence: Synthetic peptide
  Seed: HIHIFSFTGEEMATK
HIHFFSLTPEEDATK

SEQ ID NO: 278656 - protein, 15 aa, Artificial Sequence
  Description of Artificial Sequence: Synthetic peptide
  Seed: HIHIFSFTGEEMATK
HIHFFSLTPEEEATK

SEQ ID NO: 278657 - protein, 15 aa, Artificial Sequence
  Description of Artificial Sequence: Synthetic peptide
  Seed: HIHIFSFTGEEMATK
HIHFFSLTPEEFATK

SEQ ID NO: 278658 - protein, 15 aa, Artificial Sequence
  Description of Artificial Sequence: Synthetic peptide
  Seed: HIHIFSFTGEEMATK
HIHFFSLTPEEGATK

SEQ ID NO: 278659 - protein, 15 aa, Artificial Sequence
  Description of Artificial Sequence: Synthetic peptide
  Seed: HIHIFSFTGEEMATK
HIHFFSLTPEEHATK

SEQ ID NO: 278660 - protein, 15 aa, Artificial Sequence
  Description of Artificial Sequence: Synthetic peptide
  Seed: HIHIFSFTGEEMATK
HIHFFSLTPEEIATK

SEQ ID NO: 278661 - protein, 15 aa, Artificial Sequence
  Description of Artificial Sequence: Synthetic peptide
  Seed: HIHIFSFTGEEMATK
HIHFFSLTPEEKATK

SEQ ID NO: 278662 - protein, 15 aa, Artificial Sequence
  Description of Artificial Sequence: Synthetic peptide
  Seed: HIHIFSFTGEEMATK
HIHFFSLTPEELATK

SEQ ID NO: 278663 - protein, 15 aa, Artificial Sequence
  Description of Artificial Sequence: Synthetic peptide
  Seed: HIHIFSFTGEEMATK
HIHFFSLTPEEMATK

SEQ ID NO: 278664 - protein, 15 aa, Artificial Sequence
  Description of Artificial Sequence: Synthetic peptide
  Seed: HIHIFSFTGEEMATK
HIHFFSLTPEENATK

SEQ ID NO: 278665 - protein, 15 aa, Artificial Sequence
  Description of Artificial Sequence: Synthetic peptide
  Seed: HIHIFSFTGEEMATK
HIHFFSLTPEEPATK

SEQ ID NO: 278666 - protein, 15 aa, Artificial Sequence
  Description of Artificial Sequence: Synthetic peptide
  Seed: HIHIFSFTGEEMATK
HIHFFSLTPEEQATK

SEQ ID NO: 278667 - protein, 15 aa, Artificial Sequence
  Description of Artificial Sequence: Synthetic peptide
  Seed: HIHIFSFTGEEMATK
HIHFFSLTPEERATK

SEQ ID NO: 278668 - protein, 15 aa, Artificial Sequence
  Description of Artificial Sequence: Synthetic peptide
  Seed: HIHIFSFTGEEMATK
HIHFFSLTPEESATK

SEQ ID NO: 278669 - protein, 15 aa, Artificial Sequence
  Description of Artificial Sequence: Synthetic peptide
  Seed: HIHIFSFTGEEMATK
HIHFFSLTPEETATK

SEQ ID NO: 278670 - protein, 15 aa, Artificial Sequence
  Description of Artificial Sequence: Synthetic peptide
  Seed: HIHIFSFTGEEMATK
HIHFFSLTPEEVATK

SEQ ID NO: 278671 - protein, 15 aa, Artificial Sequence
  Description of Artificial Sequence: Synthetic peptide
  Seed: HIHIFSFTGEEMATK
HIHFFSLTPEEWATK

SEQ ID NO: 278672 - protein, 15 aa, Artificial Sequence
  Description of Artificial Sequence: Synthetic peptide
  Seed: HIHIFSFTGEEMATK
HIHFFSLTPEEYATK

SEQ ID NO: 278673 - protein, 15 aa, Artificial Sequence
  Description of Artificial Sequence: Synthetic peptide
  Seed: HIHIFSFTGEEMATK
HIHFFSLTQEEAATK

SEQ ID NO: 278674 - protein, 15 aa, Artificial Sequence
  Description of Artificial Sequence: Synthetic peptide
  Seed: HIHIFSFTGEEMATK
HIHFFSLTQEEIATK

SEQ ID NO: 278675 - protein, 15 aa, Artificial Sequence
  Description of Artificial Sequence: Synthetic peptide
  Seed: HIHIFSFTGEEMATK
HIHFFSLTQEELATK

SEQ ID NO: 278676 - protein, 15 aa, Artificial Sequence
  Description of Artificial Sequence: Synthetic peptide
  Seed: HIHIFSFTGEEMATK
HIHFFSLTQEEMATK

SEQ ID NO: 278677 - protein, 15 aa, Artificial Sequence
  Description of Artificial Sequence: Synthetic peptide
  Seed: HIHIFSFTGEEMATK
HIHFFSLTQEEVATK

SEQ ID NO: 278678 - protein, 15 aa, Artificial Sequence
  Description of Artificial Sequence: Synthetic peptide
  Seed: HIHIFSFTGEEMATK
HIHFFSLTSEEAATK

SEQ ID NO: 278679 - protein, 15 aa, Artificial Sequence
  Description of Artificial Sequence: Synthetic peptide
  Seed: HIHIFSFTGEEMATK
HIHFFSLTSEECATK

SEQ ID NO: 278680 - protein, 15 aa, Artificial Sequence
  Description of Artificial Sequence: Synthetic peptide
  Seed: HIHIFSFTGEEMATK
HIHFFSLTSEEDATK

SEQ ID NO: 278681 - protein, 15 aa, Artificial Sequence
  Description of Artificial Sequence: Synthetic peptide
  Seed: HIHIFSFTGEEMATK
HIHFFSLTSEEEATK

SEQ ID NO: 278682 - protein, 15 aa, Artificial Sequence
  Description of Artificial Sequence: Synthetic peptide
  Seed: HIHIFSFTGEEMATK
HIHFFSLTSEEFATK

SEQ ID NO: 278683 - protein, 15 aa, Artificial Sequence
  Description of Artificial Sequence: Synthetic peptide
  Seed: HIHIFSFTGEEMATK
HIHFFSLTSEEGATK

SEQ ID NO: 278684 - protein, 15 aa, Artificial Sequence
  Description of Artificial Sequence: Synthetic peptide
  Seed: HIHIFSFTGEEMATK
HIHFFSLTSEEHATK

SEQ ID NO: 278685 - protein, 15 aa, Artificial Sequence
  Description of Artificial Sequence: Synthetic peptide
  Seed: HIHIFSFTGEEMATK
HIHFFSLTSEEIATK

SEQ ID NO: 278686 - protein, 15 aa, Artificial Sequence
  Description of Artificial Sequence: Synthetic peptide
  Seed: HIHIFSFTGEEMATK
HIHFFSLTSEEKATK

SEQ ID NO: 278687 - protein, 15 aa, Artificial Sequence
  Description of Artificial Sequence: Synthetic peptide
  Seed: HIHIFSFTGEEMATK
HIHFFSLTSEELATK

SEQ ID NO: 278688 - protein, 15 aa, Artificial Sequence
  Description of Artificial Sequence: Synthetic peptide
  Seed: HIHIFSFTGEEMATK
HIHFFSLTSEEMATK

SEQ ID NO: 278689 - protein, 15 aa, Artificial Sequence
  Description of Artificial Sequence: Synthetic peptide
  Seed: HIHIFSFTGEEMATK
HIHFFSLTSEENATK

SEQ ID NO: 278690 - protein, 15 aa, Artificial Sequence
  Description of Artificial Sequence: Synthetic peptide
  Seed: HIHIFSFTGEEMATK
HIHFFSLTSEEPATK

SEQ ID NO: 278691 - protein, 15 aa, Artificial Sequence
  Description of Artificial Sequence: Synthetic peptide
  Seed: HIHIFSFTGEEMATK
HIHFFSLTSEEQATK

SEQ ID NO: 278692 - protein, 15 aa, Artificial Sequence
  Description of Artificial Sequence: Synthetic peptide
  Seed: HIHIFSFTGEEMATK
HIHFFSLTSEERATK

SEQ ID NO: 278693 - protein, 15 aa, Artificial Sequence
  Description of Artificial Sequence: Synthetic peptide
  Seed: HIHIFSFTGEEMATK
HIHFFSLTSEESATK

SEQ ID NO: 278694 - protein, 15 aa, Artificial Sequence
  Description of Artificial Sequence: Synthetic peptide
  Seed: HIHIFSFTGEEMATK
HIHFFSLTSEETATK

SEQ ID NO: 278695 - protein, 15 aa, Artificial Sequence
  Description of Artificial Sequence: Synthetic peptide
  Seed: HIHIFSFTGEEMATK
HIHFFSLTSEEVATK

SEQ ID NO: 278696 - protein, 15 aa, Artificial Sequence
  Description of Artificial Sequence: Synthetic peptide
  Seed: HIHIFSFTGEEMATK
HIHFFSLTSEEWATK

SEQ ID NO: 278697 - protein, 15 aa, Artificial Sequence
  Description of Artificial Sequence: Synthetic peptide
  Seed: HIHIFSFTGEEMATK
HIHFFSLTSEEYATK

SEQ ID NO: 278698 - protein, 15 aa, Artificial Sequence
  Description of Artificial Sequence: Synthetic peptide
  Seed: HIHIFSFTGEEMATK
HIHFFSLTTEEAATK

SEQ ID NO: 278699 - protein, 15 aa, Artificial Sequence
  Description of Artificial Sequence: Synthetic peptide
  Seed: HIHIFSFTGEEMATK
HIHFFSLTTEECATK

SEQ ID NO: 278700 - protein, 15 aa, Artificial Sequence
  Description of Artificial Sequence: Synthetic peptide
  Seed: HIHIFSFTGEEMATK
HIHFFSLTTEEDATK

SEQ ID NO: 278701 - protein, 15 aa, Artificial Sequence
  Description of Artificial Sequence: Synthetic peptide
  Seed: HIHIFSFTGEEMATK
HIHFFSLTTEEEATK

SEQ ID NO: 278702 - protein, 15 aa, Artificial Sequence
  Description of Artificial Sequence: Synthetic peptide
  Seed: HIHIFSFTGEEMATK
HIHFFSLTTEEFATK

SEQ ID NO: 278703 - protein, 15 aa, Artificial Sequence
  Description of Artificial Sequence: Synthetic peptide
  Seed: HIHIFSFTGEEMATK
HIHFFSLTTEEGATK

SEQ ID NO: 278704 - protein, 15 aa, Artificial Sequence
  Description of Artificial Sequence: Synthetic peptide
  Seed: HIHIFSFTGEEMATK
HIHFFSLTTEEHATK

SEQ ID NO: 278705 - protein, 15 aa, Artificial Sequence
  Description of Artificial Sequence: Synthetic peptide
  Seed: HIHIFSFTGEEMATK
HIHFFSLTTEEIATK

SEQ ID NO: 278706 - protein, 15 aa, Artificial Sequence
  Description of Artificial Sequence: Synthetic peptide
  Seed: HIHIFSFTGEEMATK
HIHFFSLTTEEKATK

SEQ ID NO: 278707 - protein, 15 aa, Artificial Sequence
  Description of Artificial Sequence: Synthetic peptide
  Seed: HIHIFSFTGEEMATK
HIHFFSLTTEELATK

SEQ ID NO: 278708 - protein, 15 aa, Artificial Sequence
  Description of Artificial Sequence: Synthetic peptide
  Seed: HIHIFSFTGEEMATK
HIHFFSLTTEEMATK

SEQ ID NO: 278709 - protein, 15 aa, Artificial Sequence
  Description of Artificial Sequence: Synthetic peptide
  Seed: HIHIFSFTGEEMATK
HIHFFSLTTEENATK

SEQ ID NO: 278710 - protein, 15 aa, Artificial Sequence
  Description of Artificial Sequence: Synthetic peptide
  Seed: HIHIFSFTGEEMATK
HIHFFSLTTEEPATK

SEQ ID NO: 278711 - protein, 15 aa, Artificial Sequence
  Description of Artificial Sequence: Synthetic peptide
  Seed: HIHIFSFTGEEMATK
HIHFFSLTTEEQATK

SEQ ID NO: 278712 - protein, 15 aa, Artificial Sequence
  Description of Artificial Sequence: Synthetic peptide
  Seed: HIHIFSFTGEEMATK
HIHFFSLTTEERATK

SEQ ID NO: 278713 - protein, 15 aa, Artificial Sequence
  Description of Artificial Sequence: Synthetic peptide
  Seed: HIHIFSFTGEEMATK
HIHFFSLTTEESATK

SEQ ID NO: 278714 - protein, 15 aa, Artificial Sequence
  Description of Artificial Sequence: Synthetic peptide
  Seed: HIHIFSFTGEEMATK
HIHFFSLTTEETATK

SEQ ID NO: 278715 - protein, 15 aa, Artificial Sequence
  Description of Artificial Sequence: Synthetic peptide
  Seed: HIHIFSFTGEEMATK
HIHFFSLTTEEVATK

SEQ ID NO: 278716 - protein, 15 aa, Artificial Sequence
  Description of Artificial Sequence: Synthetic peptide
  Seed: HIHIFSFTGEEMATK
HIHFFSLTTEEWATK

SEQ ID NO: 278717 - protein, 15 aa, Artificial Sequence
  Description of Artificial Sequence: Synthetic peptide
  Seed: HIHIFSFTGEEMATK
HIHFFSLTTEEYATK

SEQ ID NO: 278718 - protein, 15 aa, Artificial Sequence
  Description of Artificial Sequence: Synthetic peptide
  Seed: HIHIFSFTGEEMATK
HIHFFSLTVEEAATK

SEQ ID NO: 278719 - protein, 15 aa, Artificial Sequence
  Description of Artificial Sequence: Synthetic peptide
  Seed: HIHIFSFTGEEMATK
HIHFFSLTVEECATK

SEQ ID NO: 278720 - protein, 15 aa, Artificial Sequence
  Description of Artificial Sequence: Synthetic peptide
  Seed: HIHIFSFTGEEMATK
HIHFFSLTVEEDATK

SEQ ID NO: 278721 - protein, 15 aa, Artificial Sequence
  Description of Artificial Sequence: Synthetic peptide
  Seed: HIHIFSFTGEEMATK
HIHFFSLTVEEEATK

SEQ ID NO: 278722 - protein, 15 aa, Artificial Sequence
  Description of Artificial Sequence: Synthetic peptide
  Seed: HIHIFSFTGEEMATK
HIHFFSLTVEEFATK

SEQ ID NO: 278723 - protein, 15 aa, Artificial Sequence
  Description of Artificial Sequence: Synthetic peptide
  Seed: HIHIFSFTGEEMATK
HIHFFSLTVEEGATK

SEQ ID NO: 278724 - protein, 15 aa, Artificial Sequence
  Description of Artificial Sequence: Synthetic peptide
  Seed: HIHIFSFTGEEMATK
HIHFFSLTVEEHATK

SEQ ID NO: 278725 - protein, 15 aa, Artificial Sequence
  Description of Artificial Sequence: Synthetic peptide
  Seed: HIHIFSFTGEEMATK
HIHFFSLTVEEIATK

SEQ ID NO: 278726 - protein, 15 aa, Artificial Sequence
  Description of Artificial Sequence: Synthetic peptide
  Seed: HIHIFSFTGEEMATK
HIHFFSLTVEEKATK

SEQ ID NO: 278727 - protein, 15 aa, Artificial Sequence
  Description of Artificial Sequence: Synthetic peptide
  Seed: HIHIFSFTGEEMATK
HIHFFSLTVEELATK

SEQ ID NO: 278728 - protein, 15 aa, Artificial Sequence
  Description of Artificial Sequence: Synthetic peptide
  Seed: HIHIFSFTGEEMATK
HIHFFSLTVEEMATK

SEQ ID NO: 278729 - protein, 15 aa, Artificial Sequence
  Description of Artificial Sequence: Synthetic peptide
  Seed: HIHIFSFTGEEMATK
HIHFFSLTVEENATK

SEQ ID NO: 278730 - protein, 15 aa, Artificial Sequence
  Description of Artificial Sequence: Synthetic peptide
  Seed: HIHIFSFTGEEMATK
HIHFFSLTVEEPATK

SEQ ID NO: 278731 - protein, 15 aa, Artificial Sequence
  Description of Artificial Sequence: Synthetic peptide
  Seed: HIHIFSFTGEEMATK
HIHFFSLTVEEQATK

SEQ ID NO: 278732 - protein, 15 aa, Artificial Sequence
  Description of Artificial Sequence: Synthetic peptide
  Seed: HIHIFSFTGEEMATK
HIHFFSLTVEERATK

SEQ ID NO: 278733 - protein, 15 aa, Artificial Sequence
  Description of Artificial Sequence: Synthetic peptide
  Seed: HIHIFSFTGEEMATK
HIHFFSLTVEESATK

SEQ ID NO: 278734 - protein, 15 aa, Artificial Sequence
  Description of Artificial Sequence: Synthetic peptide
  Seed: HIHIFSFTGEEMATK
HIHFFSLTVEETATK

SEQ ID NO: 278735 - protein, 15 aa, Artificial Sequence
  Description of Artificial Sequence: Synthetic peptide
  Seed: HIHIFSFTGEEMATK
HIHFFSLTVEEVATK

SEQ ID NO: 278736 - protein, 15 aa, Artificial Sequence
  Description of Artificial Sequence: Synthetic peptide
  Seed: HIHIFSFTGEEMATK
HIHFFSLTVEEYATK

SEQ ID NO: 278737 - protein, 15 aa, Artificial Sequence
  Description of Artificial Sequence: Synthetic peptide
  Seed: HIHIFSFTGEEMATK
HIHFFSLTWEEAATK

SEQ ID NO: 278738 - protein, 15 aa, Artificial Sequence
  Description of Artificial Sequence: Synthetic peptide
  Seed: HIHIFSFTGEEMATK
HIHFFSLTWEEDATK

SEQ ID NO: 278739 - protein, 15 aa, Artificial Sequence
  Description of Artificial Sequence: Synthetic peptide
  Seed: HIHIFSFTGEEMATK
HIHFFSLTWEEEATK

SEQ ID NO: 278740 - protein, 15 aa, Artificial Sequence
  Description of Artificial Sequence: Synthetic peptide
  Seed: HIHIFSFTGEEMATK
HIHFFSLTWEEFATK

SEQ ID NO: 278741 - protein, 15 aa, Artificial Sequence
  Description of Artificial Sequence: Synthetic peptide
  Seed: HIHIFSFTGEEMATK
HIHFFSLTWEEHATK

SEQ ID NO: 278742 - protein, 15 aa, Artificial Sequence
  Description of Artificial Sequence: Synthetic peptide
  Seed: HIHIFSFTGEEMATK
HIHFFSLTWEEIATK

SEQ ID NO: 278743 - protein, 15 aa, Artificial Sequence
  Description of Artificial Sequence: Synthetic peptide
  Seed: HIHIFSFTGEEMATK
HIHFFSLTWEELATK

SEQ ID NO: 278744 - protein, 15 aa, Artificial Sequence
  Description of Artificial Sequence: Synthetic peptide
  Seed: HIHIFSFTGEEMATK
HIHFFSLTWEEMATK

SEQ ID NO: 278745 - protein, 15 aa, Artificial Sequence
  Description of Artificial Sequence: Synthetic peptide
  Seed: HIHIFSFTGEEMATK
HIHFFSLTWEENATK

SEQ ID NO: 278746 - protein, 15 aa, Artificial Sequence
  Description of Artificial Sequence: Synthetic peptide
  Seed: HIHIFSFTGEEMATK
HIHFFSLTWEEPATK

SEQ ID NO: 278747 - protein, 15 aa, Artificial Sequence
  Description of Artificial Sequence: Synthetic peptide
  Seed: HIHIFSFTGEEMATK
HIHFFSLTWEESATK

SEQ ID NO: 278748 - protein, 15 aa, Artificial Sequence
  Description of Artificial Sequence: Synthetic peptide
  Seed: HIHIFSFTGEEMATK
HIHFFSLTWEETATK

SEQ ID NO: 278749 - protein, 15 aa, Artificial Sequence
  Description of Artificial Sequence: Synthetic peptide
  Seed: HIHIFSFTGEEMATK
HIHFFSLTWEEVATK

SEQ ID NO: 278750 - protein, 15 aa, Artificial Sequence
  Description of Artificial Sequence: Synthetic peptide
  Seed: HIHIFSFTGEEMATK
HIHFFSLTWEEYATK

SEQ ID NO: 278751 - protein, 15 aa, Artificial Sequence
  Description of Artificial Sequence: Synthetic peptide
  Seed: HIHIFSFTGEEMATK
HIHFFSLTYEEAATK

SEQ ID NO: 278752 - protein, 15 aa, Artificial Sequence
  Description of Artificial Sequence: Synthetic peptide
  Seed: HIHIFSFTGEEMATK
HIHFFSLTYEEDATK

SEQ ID NO: 278753 - protein, 15 aa, Artificial Sequence
  Description of Artificial Sequence: Synthetic peptide
  Seed: HIHIFSFTGEEMATK
HIHFFSLTYEEEATK

SEQ ID NO: 278754 - protein, 15 aa, Artificial Sequence
  Description of Artificial Sequence: Synthetic peptide
  Seed: HIHIFSFTGEEMATK
HIHFFSLTYEEFATK

SEQ ID NO: 278755 - protein, 15 aa, Artificial Sequence
  Description of Artificial Sequence: Synthetic peptide
  Seed: HIHIFSFTGEEMATK
HIHFFSLTYEEHATK

SEQ ID NO: 278756 - protein, 15 aa, Artificial Sequence
  Description of Artificial Sequence: Synthetic peptide
  Seed: HIHIFSFTGEEMATK
HIHFFSLTYEEIATK

SEQ ID NO: 278757 - protein, 15 aa, Artificial Sequence
  Description of Artificial Sequence: Synthetic peptide
  Seed: HIHIFSFTGEEMATK
HIHFFSLTYEELATK

SEQ ID NO: 278758 - protein, 15 aa, Artificial Sequence
  Description of Artificial Sequence: Synthetic peptide
  Seed: HIHIFSFTGEEMATK
HIHFFSLTYEEMATK

SEQ ID NO: 278759 - protein, 15 aa, Artificial Sequence
  Description of Artificial Sequence: Synthetic peptide
  Seed: HIHIFSFTGEEMATK
HIHFFSLTYEENATK

SEQ ID NO: 278760 - protein, 15 aa, Artificial Sequence
  Description of Artificial Sequence: Synthetic peptide
  Seed: HIHIFSFTGEEMATK
HIHFFSLTYEEPATK

SEQ ID NO: 278761 - protein, 15 aa, Artificial Sequence
  Description of Artificial Sequence: Synthetic peptide
  Seed: HIHIFSFTGEEMATK
HIHFFSLTYEERATK

SEQ ID NO: 278762 - protein, 15 aa, Artificial Sequence
  Description of Artificial Sequence: Synthetic peptide
  Seed: HIHIFSFTGEEMATK
HIHFFSLTYEESATK

SEQ ID NO: 278763 - protein, 15 aa, Artificial Sequence
  Description of Artificial Sequence: Synthetic peptide
  Seed: HIHIFSFTGEEMATK
HIHFFSLTYEETATK

SEQ ID NO: 278764 - protein, 15 aa, Artificial Sequence
  Description of Artificial Sequence: Synthetic peptide
  Seed: HIHIFSFTGEEMATK
HIHFFSLTYEEVATK

SEQ ID NO: 278765 - protein, 15 aa, Artificial Sequence
  Description of Artificial Sequence: Synthetic peptide
  Seed: HIHIFSFTGEEMATK
HIHFFSLTYEEWATK

SEQ ID NO: 278766 - protein, 15 aa, Artificial Sequence
  Description of Artificial Sequence: Synthetic peptide
  Seed: HIHIFSFTGEEMATK
HIHFFSLTYEEYATK

SEQ ID NO: 278767 - protein, 15 aa, Artificial Sequence
  Description of Artificial Sequence: Synthetic peptide
  Seed: HIHIFSFTGEEMATK
HIHFFSMTAEEAATK

SEQ ID NO: 278768 - protein, 15 aa, Artificial Sequence
  Description of Artificial Sequence: Synthetic peptide
  Seed: HIHIFSFTGEEMATK
HIHFFSMTAEECATK

SEQ ID NO: 278769 - protein, 15 aa, Artificial Sequence
  Description of Artificial Sequence: Synthetic peptide
  Seed: HIHIFSFTGEEMATK
HIHFFSMTAEEDATK

SEQ ID NO: 278770 - protein, 15 aa, Artificial Sequence
  Description of Artificial Sequence: Synthetic peptide
  Seed: HIHIFSFTGEEMATK
HIHFFSMTAEEEATK

SEQ ID NO: 278771 - protein, 15 aa, Artificial Sequence
  Description of Artificial Sequence: Synthetic peptide
  Seed: HIHIFSFTGEEMATK
HIHFFSMTAEEFATK

SEQ ID NO: 278772 - protein, 15 aa, Artificial Sequence
  Description of Artificial Sequence: Synthetic peptide
  Seed: HIHIFSFTGEEMATK
HIHFFSMTAEEGATK

SEQ ID NO: 278773 - protein, 15 aa, Artificial Sequence
  Description of Artificial Sequence: Synthetic peptide
  Seed: HIHIFSFTGEEMATK
HIHFFSMTAEEHATK

SEQ ID NO: 278774 - protein, 15 aa, Artificial Sequence
  Description of Artificial Sequence: Synthetic peptide
  Seed: HIHIFSFTGEEMATK
HIHFFSMTAEEIATK

SEQ ID NO: 278775 - protein, 15 aa, Artificial Sequence
  Description of Artificial Sequence: Synthetic peptide
  Seed: HIHIFSFTGEEMATK
HIHFFSMTAEEKATK

SEQ ID NO: 278776 - protein, 15 aa, Artificial Sequence
  Description of Artificial Sequence: Synthetic peptide
  Seed: HIHIFSFTGEEMATK
HIHFFSMTAEELATK

SEQ ID NO: 278777 - protein, 15 aa, Artificial Sequence
  Description of Artificial Sequence: Synthetic peptide
  Seed: HIHIFSFTGEEMATK
HIHFFSMTAEEMATK

SEQ ID NO: 278778 - protein, 15 aa, Artificial Sequence
  Description of Artificial Sequence: Synthetic peptide
  Seed: HIHIFSFTGEEMATK
HIHFFSMTAEENATK

SEQ ID NO: 278779 - protein, 15 aa, Artificial Sequence
  Description of Artificial Sequence: Synthetic peptide
  Seed: HIHIFSFTGEEMATK
HIHFFSMTAEEPATK

SEQ ID NO: 278780 - protein, 15 aa, Artificial Sequence
  Description of Artificial Sequence: Synthetic peptide
  Seed: HIHIFSFTGEEMATK
HIHFFSMTAEEQATK

SEQ ID NO: 278781 - protein, 15 aa, Artificial Sequence
  Description of Artificial Sequence: Synthetic peptide
  Seed: HIHIFSFTGEEMATK
HIHFFSMTAEERATK

SEQ ID NO: 278782 - protein, 15 aa, Artificial Sequence
  Description of Artificial Sequence: Synthetic peptide
  Seed: HIHIFSFTGEEMATK
HIHFFSMTAEESATK

SEQ ID NO: 278783 - protein, 15 aa, Artificial Sequence
  Description of Artificial Sequence: Synthetic peptide
  Seed: HIHIFSFTGEEMATK
HIHFFSMTAEETATK

SEQ ID NO: 278784 - protein, 15 aa, Artificial Sequence
  Description of Artificial Sequence: Synthetic peptide
  Seed: HIHIFSFTGEEMATK
HIHFFSMTAEEVATK

SEQ ID NO: 278785 - protein, 15 aa, Artificial Sequence
  Description of Artificial Sequence: Synthetic peptide
  Seed: HIHIFSFTGEEMATK
HIHFFSMTAEEWATK

SEQ ID NO: 278786 - protein, 15 aa, Artificial Sequence
  Description of Artificial Sequence: Synthetic peptide
  Seed: HIHIFSFTGEEMATK
HIHFFSMTAEEYATK

SEQ ID NO: 278787 - protein, 15 aa, Artificial Sequence
  Description of Artificial Sequence: Synthetic peptide
  Seed: HIHIFSFTGEEMATK
HIHFFSMTCEEAATK

SEQ ID NO: 278788 - protein, 15 aa, Artificial Sequence
  Description of Artificial Sequence: Synthetic peptide
  Seed: HIHIFSFTGEEMATK
HIHFFSMTFEEAATK

SEQ ID NO: 278789 - protein, 15 aa, Artificial Sequence
  Description of Artificial Sequence: Synthetic peptide
  Seed: HIHIFSFTGEEMATK
HIHFFSMTFEECATK

SEQ ID NO: 278790 - protein, 15 aa, Artificial Sequence
  Description of Artificial Sequence: Synthetic peptide
  Seed: HIHIFSFTGEEMATK
HIHFFSMTFEEDATK

SEQ ID NO: 278791 - protein, 15 aa, Artificial Sequence
  Description of Artificial Sequence: Synthetic peptide
  Seed: HIHIFSFTGEEMATK
HIHFFSMTFEEEATK

SEQ ID NO: 278792 - protein, 15 aa, Artificial Sequence
  Description of Artificial Sequence: Synthetic peptide
  Seed: HIHIFSFTGEEMATK
HIHFFSMTFEEFATK

SEQ ID NO: 278793 - protein, 15 aa, Artificial Sequence
  Description of Artificial Sequence: Synthetic peptide
  Seed: HIHIFSFTGEEMATK
HIHFFSMTFEEGATK

SEQ ID NO: 278794 - protein, 15 aa, Artificial Sequence
  Description of Artificial Sequence: Synthetic peptide
  Seed: HIHIFSFTGEEMATK
HIHFFSMTFEEHATK

SEQ ID NO: 278795 - protein, 15 aa, Artificial Sequence
  Description of Artificial Sequence: Synthetic peptide
  Seed: HIHIFSFTGEEMATK
HIHFFSMTFEEIATK

SEQ ID NO: 278796 - protein, 15 aa, Artificial Sequence
  Description of Artificial Sequence: Synthetic peptide
  Seed: HIHIFSFTGEEMATK
HIHFFSMTFEEKATK

SEQ ID NO: 278797 - protein, 15 aa, Artificial Sequence
  Description of Artificial Sequence: Synthetic peptide
  Seed: HIHIFSFTGEEMATK
HIHFFSMTFEELATK

SEQ ID NO: 278798 - protein, 15 aa, Artificial Sequence
  Description of Artificial Sequence: Synthetic peptide
  Seed: HIHIFSFTGEEMATK
HIHFFSMTFEEMATK

SEQ ID NO: 278799 - protein, 15 aa, Artificial Sequence
  Description of Artificial Sequence: Synthetic peptide
  Seed: HIHIFSFTGEEMATK
HIHFFSMTFEENATK

SEQ ID NO: 278800 - protein, 15 aa, Artificial Sequence
  Description of Artificial Sequence: Synthetic peptide
  Seed: HIHIFSFTGEEMATK
HIHFFSMTFEEPATK

SEQ ID NO: 278801 - protein, 15 aa, Artificial Sequence
  Description of Artificial Sequence: Synthetic peptide
  Seed: HIHIFSFTGEEMATK
HIHFFSMTFEEQATK

SEQ ID NO: 278802 - protein, 15 aa, Artificial Sequence
  Description of Artificial Sequence: Synthetic peptide
  Seed: HIHIFSFTGEEMATK
HIHFFSMTFEERATK

SEQ ID NO: 278803 - protein, 15 aa, Artificial Sequence
  Description of Artificial Sequence: Synthetic peptide
  Seed: HIHIFSFTGEEMATK
HIHFFSMTFEESATK

SEQ ID NO: 278804 - protein, 15 aa, Artificial Sequence
  Description of Artificial Sequence: Synthetic peptide
  Seed: HIHIFSFTGEEMATK
HIHFFSMTFEETATK

SEQ ID NO: 278805 - protein, 15 aa, Artificial Sequence
  Description of Artificial Sequence: Synthetic peptide
  Seed: HIHIFSFTGEEMATK
HIHFFSMTFEEVATK

SEQ ID NO: 278806 - protein, 15 aa, Artificial Sequence
  Description of Artificial Sequence: Synthetic peptide
  Seed: HIHIFSFTGEEMATK
HIHFFSMTFEEWATK

SEQ ID NO: 278807 - protein, 15 aa, Artificial Sequence
  Description of Artificial Sequence: Synthetic peptide
  Seed: HIHIFSFTGEEMATK
HIHFFSMTFEEYATK

SEQ ID NO: 278808 - protein, 15 aa, Artificial Sequence
  Description of Artificial Sequence: Synthetic peptide
  Seed: HIHIFSFTGEEMATK
HIHFFSMTGEEAATK

SEQ ID NO: 278809 - protein, 15 aa, Artificial Sequence
  Description of Artificial Sequence: Synthetic peptide
  Seed: HIHIFSFTGEEMATK
HIHFFSMTGEECATK

SEQ ID NO: 278810 - protein, 15 aa, Artificial Sequence
  Description of Artificial Sequence: Synthetic peptide
  Seed: HIHIFSFTGEEMATK
HIHFFSMTGEEDATK

SEQ ID NO: 278811 - protein, 15 aa, Artificial Sequence
  Description of Artificial Sequence: Synthetic peptide
  Seed: HIHIFSFTGEEMATK
HIHFFSMTGEEEATK

SEQ ID NO: 278812 - protein, 15 aa, Artificial Sequence
  Description of Artificial Sequence: Synthetic peptide
  Seed: HIHIFSFTGEEMATK
HIHFFSMTGEEFATK

SEQ ID NO: 278813 - protein, 15 aa, Artificial Sequence
  Description of Artificial Sequence: Synthetic peptide
  Seed: HIHIFSFTGEEMATK
HIHFFSMTGEEGATK

SEQ ID NO: 278814 - protein, 15 aa, Artificial Sequence
  Description of Artificial Sequence: Synthetic peptide
  Seed: HIHIFSFTGEEMATK
HIHFFSMTGEEHATK

SEQ ID NO: 278815 - protein, 15 aa, Artificial Sequence
  Description of Artificial Sequence: Synthetic peptide
  Seed: HIHIFSFTGEEMATK
HIHFFSMTGEEIATK

SEQ ID NO: 278816 - protein, 15 aa, Artificial Sequence
  Description of Artificial Sequence: Synthetic peptide
  Seed: HIHIFSFTGEEMATK
HIHFFSMTGEEKATK

SEQ ID NO: 278817 - protein, 15 aa, Artificial Sequence
  Description of Artificial Sequence: Synthetic peptide
  Seed: HIHIFSFTGEEMATK
HIHFFSMTGEELATK

SEQ ID NO: 278818 - protein, 15 aa, Artificial Sequence
  Description of Artificial Sequence: Synthetic peptide
  Seed: HIHIFSFTGEEMATK
HIHFFSMTGEEMATK

SEQ ID NO: 278819 - protein, 15 aa, Artificial Sequence
  Description of Artificial Sequence: Synthetic peptide
  Seed: HIHIFSFTGEEMATK
HIHFFSMTGEENATK

SEQ ID NO: 278820 - protein, 15 aa, Artificial Sequence
  Description of Artificial Sequence: Synthetic peptide
  Seed: HIHIFSFTGEEMATK
HIHFFSMTGEEPATK

SEQ ID NO: 278821 - protein, 15 aa, Artificial Sequence
  Description of Artificial Sequence: Synthetic peptide
  Seed: HIHIFSFTGEEMATK
HIHFFSMTGEEQATK

SEQ ID NO: 278822 - protein, 15 aa, Artificial Sequence
  Description of Artificial Sequence: Synthetic peptide
  Seed: HIHIFSFTGEEMATK
HIHFFSMTGEERATK

SEQ ID NO: 278823 - protein, 15 aa, Artificial Sequence
  Description of Artificial Sequence: Synthetic peptide
  Seed: HIHIFSFTGEEMATK
HIHFFSMTGEESATK

SEQ ID NO: 278824 - protein, 15 aa, Artificial Sequence
  Description of Artificial Sequence: Synthetic peptide
  Seed: HIHIFSFTGEEMATK
HIHFFSMTGEETATK

SEQ ID NO: 278825 - protein, 15 aa, Artificial Sequence
  Description of Artificial Sequence: Synthetic peptide
  Seed: HIHIFSFTGEEMATK
HIHFFSMTGEEVATK

SEQ ID NO: 278826 - protein, 15 aa, Artificial Sequence
  Description of Artificial Sequence: Synthetic peptide
  Seed: HIHIFSFTGEEMATK
HIHFFSMTGEEYATK

SEQ ID NO: 278827 - protein, 15 aa, Artificial Sequence
  Description of Artificial Sequence: Synthetic peptide
  Seed: HIHIFSFTGEEMATK
HIHFFSMTHEEAATK

SEQ ID NO: 278828 - protein, 15 aa, Artificial Sequence
  Description of Artificial Sequence: Synthetic peptide
  Seed: HIHIFSFTGEEMATK
HIHFFSMTHEEIATK

SEQ ID NO: 278829 - protein, 15 aa, Artificial Sequence
  Description of Artificial Sequence: Synthetic peptide
  Seed: HIHIFSFTGEEMATK
HIHFFSMTHEELATK

SEQ ID NO: 278830 - protein, 15 aa, Artificial Sequence
  Description of Artificial Sequence: Synthetic peptide
  Seed: HIHIFSFTGEEMATK
HIHFFSMTHEEMATK

SEQ ID NO: 278831 - protein, 15 aa, Artificial Sequence
  Description of Artificial Sequence: Synthetic peptide
  Seed: HIHIFSFTGEEMATK
HIHFFSMTHEESATK

SEQ ID NO: 278832 - protein, 15 aa, Artificial Sequence
  Description of Artificial Sequence: Synthetic peptide
  Seed: HIHIFSFTGEEMATK
HIHFFSMTHEETATK

SEQ ID NO: 278833 - protein, 15 aa, Artificial Sequence
  Description of Artificial Sequence: Synthetic peptide
  Seed: HIHIFSFTGEEMATK
HIHFFSMTHEEVATK

SEQ ID NO: 278834 - protein, 15 aa, Artificial Sequence
  Description of Artificial Sequence: Synthetic peptide
  Seed: HIHIFSFTGEEMATK
HIHFFSMTIEEAATK

SEQ ID NO: 278835 - protein, 15 aa, Artificial Sequence
  Description of Artificial Sequence: Synthetic peptide
  Seed: HIHIFSFTGEEMATK
HIHFFSMTIEECATK

SEQ ID NO: 278836 - protein, 15 aa, Artificial Sequence
  Description of Artificial Sequence: Synthetic peptide
  Seed: HIHIFSFTGEEMATK
HIHFFSMTIEEDATK

SEQ ID NO: 278837 - protein, 15 aa, Artificial Sequence
  Description of Artificial Sequence: Synthetic peptide
  Seed: HIHIFSFTGEEMATK
HIHFFSMTIEEEATK

SEQ ID NO: 278838 - protein, 15 aa, Artificial Sequence
  Description of Artificial Sequence: Synthetic peptide
  Seed: HIHIFSFTGEEMATK
HIHFFSMTIEEFATK

SEQ ID NO: 278839 - protein, 15 aa, Artificial Sequence
  Description of Artificial Sequence: Synthetic peptide
  Seed: HIHIFSFTGEEMATK
HIHFFSMTIEEGATK

SEQ ID NO: 278840 - protein, 15 aa, Artificial Sequence
  Description of Artificial Sequence: Synthetic peptide
  Seed: HIHIFSFTGEEMATK
HIHFFSMTIEEHATK

SEQ ID NO: 278841 - protein, 15 aa, Artificial Sequence
  Description of Artificial Sequence: Synthetic peptide
  Seed: HIHIFSFTGEEMATK
HIHFFSMTIEEIATK

SEQ ID NO: 278842 - protein, 15 aa, Artificial Sequence
  Description of Artificial Sequence: Synthetic peptide
  Seed: HIHIFSFTGEEMATK
HIHFFSMTIEEKATK

SEQ ID NO: 278843 - protein, 15 aa, Artificial Sequence
  Description of Artificial Sequence: Synthetic peptide
  Seed: HIHIFSFTGEEMATK
HIHFFSMTIEELATK

SEQ ID NO: 278844 - protein, 15 aa, Artificial Sequence
  Description of Artificial Sequence: Synthetic peptide
  Seed: HIHIFSFTGEEMATK
HIHFFSMTIEEMATK

SEQ ID NO: 278845 - protein, 15 aa, Artificial Sequence
  Description of Artificial Sequence: Synthetic peptide
  Seed: HIHIFSFTGEEMATK
HIHFFSMTIEENATK

SEQ ID NO: 278846 - protein, 15 aa, Artificial Sequence
  Description of Artificial Sequence: Synthetic peptide
  Seed: HIHIFSFTGEEMATK
HIHFFSMTIEEPATK

SEQ ID NO: 278847 - protein, 15 aa, Artificial Sequence
  Description of Artificial Sequence: Synthetic peptide
  Seed: HIHIFSFTGEEMATK
HIHFFSMTIEEQATK

SEQ ID NO: 278848 - protein, 15 aa, Artificial Sequence
  Description of Artificial Sequence: Synthetic peptide
  Seed: HIHIFSFTGEEMATK
HIHFFSMTIEERATK

SEQ ID NO: 278849 - protein, 15 aa, Artificial Sequence
  Description of Artificial Sequence: Synthetic peptide
  Seed: HIHIFSFTGEEMATK
HIHFFSMTIEESATK

SEQ ID NO: 278850 - protein, 15 aa, Artificial Sequence
  Description of Artificial Sequence: Synthetic peptide
  Seed: HIHIFSFTGEEMATK
HIHFFSMTIEETATK

SEQ ID NO: 278851 - protein, 15 aa, Artificial Sequence
  Description of Artificial Sequence: Synthetic peptide
  Seed: HIHIFSFTGEEMATK
HIHFFSMTIEEVATK

SEQ ID NO: 278852 - protein, 15 aa, Artificial Sequence
  Description of Artificial Sequence: Synthetic peptide
  Seed: HIHIFSFTGEEMATK
HIHFFSMTIEEYATK

SEQ ID NO: 278853 - protein, 15 aa, Artificial Sequence
  Description of Artificial Sequence: Synthetic peptide
  Seed: HIHIFSFTGEEMATK
HIHFFSMTLEEAATK

SEQ ID NO: 278854 - protein, 15 aa, Artificial Sequence
  Description of Artificial Sequence: Synthetic peptide
  Seed: HIHIFSFTGEEMATK
HIHFFSMTLEEEATK

SEQ ID NO: 278855 - protein, 15 aa, Artificial Sequence
  Description of Artificial Sequence: Synthetic peptide
  Seed: HIHIFSFTGEEMATK
HIHFFSMTLEEFATK

SEQ ID NO: 278856 - protein, 15 aa, Artificial Sequence
  Description of Artificial Sequence: Synthetic peptide
  Seed: HIHIFSFTGEEMATK
HIHFFSMTLEEGATK

SEQ ID NO: 278857 - protein, 15 aa, Artificial Sequence
  Description of Artificial Sequence: Synthetic peptide
  Seed: HIHIFSFTGEEMATK
HIHFFSMTLEEHATK

SEQ ID NO: 278858 - protein, 15 aa, Artificial Sequence
  Description of Artificial Sequence: Synthetic peptide
  Seed: HIHIFSFTGEEMATK
HIHFFSMTLEEIATK

SEQ ID NO: 278859 - protein, 15 aa, Artificial Sequence
  Description of Artificial Sequence: Synthetic peptide
  Seed: HIHIFSFTGEEMATK
HIHFFSMTLEEKATK

SEQ ID NO: 278860 - protein, 15 aa, Artificial Sequence
  Description of Artificial Sequence: Synthetic peptide
  Seed: HIHIFSFTGEEMATK
HIHFFSMTLEELATK

SEQ ID NO: 278861 - protein, 15 aa, Artificial Sequence
  Description of Artificial Sequence: Synthetic peptide
  Seed: HIHIFSFTGEEMATK
HIHFFSMTLEEMATK

SEQ ID NO: 278862 - protein, 15 aa, Artificial Sequence
  Description of Artificial Sequence: Synthetic peptide
  Seed: HIHIFSFTGEEMATK
HIHFFSMTLEENATK

SEQ ID NO: 278863 - protein, 15 aa, Artificial Sequence
  Description of Artificial Sequence: Synthetic peptide
  Seed: HIHIFSFTGEEMATK
HIHFFSMTLEEPATK

SEQ ID NO: 278864 - protein, 15 aa, Artificial Sequence
  Description of Artificial Sequence: Synthetic peptide
  Seed: HIHIFSFTGEEMATK
HIHFFSMTLEEQATK

SEQ ID NO: 278865 - protein, 15 aa, Artificial Sequence
  Description of Artificial Sequence: Synthetic peptide
  Seed: HIHIFSFTGEEMATK
HIHFFSMTLEERATK

SEQ ID NO: 278866 - protein, 15 aa, Artificial Sequence
  Description of Artificial Sequence: Synthetic peptide
  Seed: HIHIFSFTGEEMATK
HIHFFSMTLEESATK

SEQ ID NO: 278867 - protein, 15 aa, Artificial Sequence
  Description of Artificial Sequence: Synthetic peptide
  Seed: HIHIFSFTGEEMATK
HIHFFSMTLEETATK

SEQ ID NO: 278868 - protein, 15 aa, Artificial Sequence
  Description of Artificial Sequence: Synthetic peptide
  Seed: HIHIFSFTGEEMATK
HIHFFSMTLEEVATK

SEQ ID NO: 278869 - protein, 15 aa, Artificial Sequence
  Description of Artificial Sequence: Synthetic peptide
  Seed: HIHIFSFTGEEMATK
HIHFFSMTLEEYATK

SEQ ID NO: 278870 - protein, 15 aa, Artificial Sequence
  Description of Artificial Sequence: Synthetic peptide
  Seed: HIHIFSFTGEEMATK
HIHFFSMTMEEAATK

SEQ ID NO: 278871 - protein, 15 aa, Artificial Sequence
  Description of Artificial Sequence: Synthetic peptide
  Seed: HIHIFSFTGEEMATK
HIHFFSMTMEEFATK

SEQ ID NO: 278872 - protein, 15 aa, Artificial Sequence
  Description of Artificial Sequence: Synthetic peptide
  Seed: HIHIFSFTGEEMATK
HIHFFSMTMEEGATK

SEQ ID NO: 278873 - protein, 15 aa, Artificial Sequence
  Description of Artificial Sequence: Synthetic peptide
  Seed: HIHIFSFTGEEMATK
HIHFFSMTMEEHATK

SEQ ID NO: 278874 - protein, 15 aa, Artificial Sequence
  Description of Artificial Sequence: Synthetic peptide
  Seed: HIHIFSFTGEEMATK
HIHFFSMTMEEIATK

SEQ ID NO: 278875 - protein, 15 aa, Artificial Sequence
  Description of Artificial Sequence: Synthetic peptide
  Seed: HIHIFSFTGEEMATK
HIHFFSMTMEELATK

SEQ ID NO: 278876 - protein, 15 aa, Artificial Sequence
  Description of Artificial Sequence: Synthetic peptide
  Seed: HIHIFSFTGEEMATK
HIHFFSMTMEEMATK

SEQ ID NO: 278877 - protein, 15 aa, Artificial Sequence
  Description of Artificial Sequence: Synthetic peptide
  Seed: HIHIFSFTGEEMATK
HIHFFSMTMEENATK

SEQ ID NO: 278878 - protein, 15 aa, Artificial Sequence
  Description of Artificial Sequence: Synthetic peptide
  Seed: HIHIFSFTGEEMATK
HIHFFSMTMEEPATK

SEQ ID NO: 278879 - protein, 15 aa, Artificial Sequence
  Description of Artificial Sequence: Synthetic peptide
  Seed: HIHIFSFTGEEMATK
HIHFFSMTMEEQATK

SEQ ID NO: 278880 - protein, 15 aa, Artificial Sequence
  Description of Artificial Sequence: Synthetic peptide
  Seed: HIHIFSFTGEEMATK
HIHFFSMTMEESATK

SEQ ID NO: 278881 - protein, 15 aa, Artificial Sequence
  Description of Artificial Sequence: Synthetic peptide
  Seed: HIHIFSFTGEEMATK
HIHFFSMTMEETATK

SEQ ID NO: 278882 - protein, 15 aa, Artificial Sequence
  Description of Artificial Sequence: Synthetic peptide
  Seed: HIHIFSFTGEEMATK
HIHFFSMTMEEVATK

SEQ ID NO: 278883 - protein, 15 aa, Artificial Sequence
  Description of Artificial Sequence: Synthetic peptide
  Seed: HIHIFSFTGEEMATK
HIHFFSMTMEEYATK

SEQ ID NO: 278884 - protein, 15 aa, Artificial Sequence
  Description of Artificial Sequence: Synthetic peptide
  Seed: HIHIFSFTGEEMATK
HIHFFSMTNEEAATK

SEQ ID NO: 278885 - protein, 15 aa, Artificial Sequence
  Description of Artificial Sequence: Synthetic peptide
  Seed: HIHIFSFTGEEMATK
HIHFFSMTNEEDATK

SEQ ID NO: 278886 - protein, 15 aa, Artificial Sequence
  Description of Artificial Sequence: Synthetic peptide
  Seed: HIHIFSFTGEEMATK
HIHFFSMTNEEEATK

SEQ ID NO: 278887 - protein, 15 aa, Artificial Sequence
  Description of Artificial Sequence: Synthetic peptide
  Seed: HIHIFSFTGEEMATK
HIHFFSMTNEEFATK

SEQ ID NO: 278888 - protein, 15 aa, Artificial Sequence
  Description of Artificial Sequence: Synthetic peptide
  Seed: HIHIFSFTGEEMATK
HIHFFSMTNEEGATK

SEQ ID NO: 278889 - protein, 15 aa, Artificial Sequence
  Description of Artificial Sequence: Synthetic peptide
  Seed: HIHIFSFTGEEMATK
HIHFFSMTNEEHATK

SEQ ID NO: 278890 - protein, 15 aa, Artificial Sequence
  Description of Artificial Sequence: Synthetic peptide
  Seed: HIHIFSFTGEEMATK
HIHFFSMTNEEIATK

SEQ ID NO: 278891 - protein, 15 aa, Artificial Sequence
  Description of Artificial Sequence: Synthetic peptide
  Seed: HIHIFSFTGEEMATK
HIHFFSMTNEELATK

SEQ ID NO: 278892 - protein, 15 aa, Artificial Sequence
  Description of Artificial Sequence: Synthetic peptide
  Seed: HIHIFSFTGEEMATK
HIHFFSMTNEEMATK

SEQ ID NO: 278893 - protein, 15 aa, Artificial Sequence
  Description of Artificial Sequence: Synthetic peptide
  Seed: HIHIFSFTGEEMATK
HIHFFSMTNEENATK

SEQ ID NO: 278894 - protein, 15 aa, Artificial Sequence
  Description of Artificial Sequence: Synthetic peptide
  Seed: HIHIFSFTGEEMATK
HIHFFSMTNEEPATK

SEQ ID NO: 278895 - protein, 15 aa, Artificial Sequence
  Description of Artificial Sequence: Synthetic peptide
  Seed: HIHIFSFTGEEMATK
HIHFFSMTNEEQATK

SEQ ID NO: 278896 - protein, 15 aa, Artificial Sequence
  Description of Artificial Sequence: Synthetic peptide
  Seed: HIHIFSFTGEEMATK
HIHFFSMTNEESATK

SEQ ID NO: 278897 - protein, 15 aa, Artificial Sequence
  Description of Artificial Sequence: Synthetic peptide
  Seed: HIHIFSFTGEEMATK
HIHFFSMTNEETATK

SEQ ID NO: 278898 - protein, 15 aa, Artificial Sequence
  Description of Artificial Sequence: Synthetic peptide
  Seed: HIHIFSFTGEEMATK
HIHFFSMTNEEVATK

SEQ ID NO: 278899 - protein, 15 aa, Artificial Sequence
  Description of Artificial Sequence: Synthetic peptide
  Seed: HIHIFSFTGEEMATK
HIHFFSMTPEEAATK

SEQ ID NO: 278900 - protein, 15 aa, Artificial Sequence
  Description of Artificial Sequence: Synthetic peptide
  Seed: HIHIFSFTGEEMATK
HIHFFSMTPEECATK

SEQ ID NO: 278901 - protein, 15 aa, Artificial Sequence
  Description of Artificial Sequence: Synthetic peptide
  Seed: HIHIFSFTGEEMATK
HIHFFSMTPEEDATK

SEQ ID NO: 278902 - protein, 15 aa, Artificial Sequence
  Description of Artificial Sequence: Synthetic peptide
  Seed: HIHIFSFTGEEMATK
HIHFFSMTPEEEATK

SEQ ID NO: 278903 - protein, 15 aa, Artificial Sequence
  Description of Artificial Sequence: Synthetic peptide
  Seed: HIHIFSFTGEEMATK
HIHFFSMTPEEFATK

SEQ ID NO: 278904 - protein, 15 aa, Artificial Sequence
  Description of Artificial Sequence: Synthetic peptide
  Seed: HIHIFSFTGEEMATK
HIHFFSMTPEEGATK

SEQ ID NO: 278905 - protein, 15 aa, Artificial Sequence
  Description of Artificial Sequence: Synthetic peptide
  Seed: HIHIFSFTGEEMATK
HIHFFSMTPEEHATK

SEQ ID NO: 278906 - protein, 15 aa, Artificial Sequence
  Description of Artificial Sequence: Synthetic peptide
  Seed: HIHIFSFTGEEMATK
HIHFFSMTPEEIATK

SEQ ID NO: 278907 - protein, 15 aa, Artificial Sequence
  Description of Artificial Sequence: Synthetic peptide
  Seed: HIHIFSFTGEEMATK
HIHFFSMTPEEKATK

SEQ ID NO: 278908 - protein, 15 aa, Artificial Sequence
  Description of Artificial Sequence: Synthetic peptide
  Seed: HIHIFSFTGEEMATK
HIHFFSMTPEELATK

SEQ ID NO: 278909 - protein, 15 aa, Artificial Sequence
  Description of Artificial Sequence: Synthetic peptide
  Seed: HIHIFSFTGEEMATK
HIHFFSMTPEEMATK

SEQ ID NO: 278910 - protein, 15 aa, Artificial Sequence
  Description of Artificial Sequence: Synthetic peptide
  Seed: HIHIFSFTGEEMATK
HIHFFSMTPEENATK

SEQ ID NO: 278911 - protein, 15 aa, Artificial Sequence
  Description of Artificial Sequence: Synthetic peptide
  Seed: HIHIFSFTGEEMATK
HIHFFSMTPEEPATK

SEQ ID NO: 278912 - protein, 15 aa, Artificial Sequence
  Description of Artificial Sequence: Synthetic peptide
  Seed: HIHIFSFTGEEMATK
HIHFFSMTPEEQATK

SEQ ID NO: 278913 - protein, 15 aa, Artificial Sequence
  Description of Artificial Sequence: Synthetic peptide
  Seed: HIHIFSFTGEEMATK
HIHFFSMTPEERATK

SEQ ID NO: 278914 - protein, 15 aa, Artificial Sequence
  Description of Artificial Sequence: Synthetic peptide
  Seed: HIHIFSFTGEEMATK
HIHFFSMTPEESATK

SEQ ID NO: 278915 - protein, 15 aa, Artificial Sequence
  Description of Artificial Sequence: Synthetic peptide
  Seed: HIHIFSFTGEEMATK
HIHFFSMTPEETATK

SEQ ID NO: 278916 - protein, 15 aa, Artificial Sequence
  Description of Artificial Sequence: Synthetic peptide
  Seed: HIHIFSFTGEEMATK
HIHFFSMTPEEVATK

SEQ ID NO: 278917 - protein, 15 aa, Artificial Sequence
  Description of Artificial Sequence: Synthetic peptide
  Seed: HIHIFSFTGEEMATK
HIHFFSMTPEEWATK

SEQ ID NO: 278918 - protein, 15 aa, Artificial Sequence
  Description of Artificial Sequence: Synthetic peptide
  Seed: HIHIFSFTGEEMATK
HIHFFSMTPEEYATK

SEQ ID NO: 278919 - protein, 15 aa, Artificial Sequence
  Description of Artificial Sequence: Synthetic peptide
  Seed: HIHIFSFTGEEMATK
HIHFFSMTQEEAATK

SEQ ID NO: 278920 - protein, 15 aa, Artificial Sequence
  Description of Artificial Sequence: Synthetic peptide
  Seed: HIHIFSFTGEEMATK
HIHFFSMTQEEIATK

SEQ ID NO: 278921 - protein, 15 aa, Artificial Sequence
  Description of Artificial Sequence: Synthetic peptide
  Seed: HIHIFSFTGEEMATK
HIHFFSMTQEELATK

SEQ ID NO: 278922 - protein, 15 aa, Artificial Sequence
  Description of Artificial Sequence: Synthetic peptide
  Seed: HIHIFSFTGEEMATK
HIHFFSMTQEEMATK

SEQ ID NO: 278923 - protein, 15 aa, Artificial Sequence
  Description of Artificial Sequence: Synthetic peptide
  Seed: HIHIFSFTGEEMATK
HIHFFSMTQEESATK

SEQ ID NO: 278924 - protein, 15 aa, Artificial Sequence
  Description of Artificial Sequence: Synthetic peptide
  Seed: HIHIFSFTGEEMATK
HIHFFSMTQEETATK

SEQ ID NO: 278925 - protein, 15 aa, Artificial Sequence
  Description of Artificial Sequence: Synthetic peptide
  Seed: HIHIFSFTGEEMATK
HIHFFSMTQEEVATK

SEQ ID NO: 278926 - protein, 15 aa, Artificial Sequence
  Description of Artificial Sequence: Synthetic peptide
  Seed: HIHIFSFTGEEMATK
HIHFFSMTSEEAATK

SEQ ID NO: 278927 - protein, 15 aa, Artificial Sequence
  Description of Artificial Sequence: Synthetic peptide
  Seed: HIHIFSFTGEEMATK
HIHFFSMTSEECATK

SEQ ID NO: 278928 - protein, 15 aa, Artificial Sequence
  Description of Artificial Sequence: Synthetic peptide
  Seed: HIHIFSFTGEEMATK
HIHFFSMTSEEDATK

SEQ ID NO: 278929 - protein, 15 aa, Artificial Sequence
  Description of Artificial Sequence: Synthetic peptide
  Seed: HIHIFSFTGEEMATK
HIHFFSMTSEEEATK

SEQ ID NO: 278930 - protein, 15 aa, Artificial Sequence
  Description of Artificial Sequence: Synthetic peptide
  Seed: HIHIFSFTGEEMATK
HIHFFSMTSEEFATK

SEQ ID NO: 278931 - protein, 15 aa, Artificial Sequence
  Description of Artificial Sequence: Synthetic peptide
  Seed: HIHIFSFTGEEMATK
HIHFFSMTSEEGATK

SEQ ID NO: 278932 - protein, 15 aa, Artificial Sequence
  Description of Artificial Sequence: Synthetic peptide
  Seed: HIHIFSFTGEEMATK
HIHFFSMTSEEHATK

SEQ ID NO: 278933 - protein, 15 aa, Artificial Sequence
  Description of Artificial Sequence: Synthetic peptide
  Seed: HIHIFSFTGEEMATK
HIHFFSMTSEEIATK

SEQ ID NO: 278934 - protein, 15 aa, Artificial Sequence
  Description of Artificial Sequence: Synthetic peptide
  Seed: HIHIFSFTGEEMATK
HIHFFSMTSEEKATK

SEQ ID NO: 278935 - protein, 15 aa, Artificial Sequence
  Description of Artificial Sequence: Synthetic peptide
  Seed: HIHIFSFTGEEMATK
HIHFFSMTSEEMATK

SEQ ID NO: 278936 - protein, 15 aa, Artificial Sequence
  Description of Artificial Sequence: Synthetic peptide
  Seed: HIHIFSFTGEEMATK
HIHFFSMTSEENATK

SEQ ID NO: 278937 - protein, 15 aa, Artificial Sequence
  Description of Artificial Sequence: Synthetic peptide
  Seed: HIHIFSFTGEEMATK
HIHFFSMTSEEPATK

SEQ ID NO: 278938 - protein, 15 aa, Artificial Sequence
  Description of Artificial Sequence: Synthetic peptide
  Seed: HIHIFSFTGEEMATK
HIHFFSMTSEEQATK

SEQ ID NO: 278939 - protein, 15 aa, Artificial Sequence
  Description of Artificial Sequence: Synthetic peptide
  Seed: HIHIFSFTGEEMATK
HIHFFSMTSEERATK

SEQ ID NO: 278940 - protein, 15 aa, Artificial Sequence
  Description of Artificial Sequence: Synthetic peptide
  Seed: HIHIFSFTGEEMATK
HIHFFSMTSEESATK

SEQ ID NO: 278941 - protein, 15 aa, Artificial Sequence
  Description of Artificial Sequence: Synthetic peptide
  Seed: HIHIFSFTGEEMATK
HIHFFSMTSEETATK

SEQ ID NO: 278942 - protein, 15 aa, Artificial Sequence
  Description of Artificial Sequence: Synthetic peptide
  Seed: HIHIFSFTGEEMATK
HIHFFSMTSEEVATK

SEQ ID NO: 278943 - protein, 15 aa, Artificial Sequence
  Description of Artificial Sequence: Synthetic peptide
  Seed: HIHIFSFTGEEMATK
HIHFFSMTSEEWATK

SEQ ID NO: 278944 - protein, 15 aa, Artificial Sequence
  Description of Artificial Sequence: Synthetic peptide
  Seed: HIHIFSFTGEEMATK
HIHFFSMTSEEYATK

SEQ ID NO: 278945 - protein, 15 aa, Artificial Sequence
  Description of Artificial Sequence: Synthetic peptide
  Seed: HIHIFSFTGEEMATK
HIHFFSMTTEEAATK

SEQ ID NO: 278946 - protein, 15 aa, Artificial Sequence
  Description of Artificial Sequence: Synthetic peptide
  Seed: HIHIFSFTGEEMATK
HIHFFSMTTEECATK

SEQ ID NO: 278947 - protein, 15 aa, Artificial Sequence
  Description of Artificial Sequence: Synthetic peptide
  Seed: HIHIFSFTGEEMATK
HIHFFSMTTEEDATK

SEQ ID NO: 278948 - protein, 15 aa, Artificial Sequence
  Description of Artificial Sequence: Synthetic peptide
  Seed: HIHIFSFTGEEMATK
HIHFFSMTTEEEATK

SEQ ID NO: 278949 - protein, 15 aa, Artificial Sequence
  Description of Artificial Sequence: Synthetic peptide
  Seed: HIHIFSFTGEEMATK
HIHFFSMTTEEFATK

SEQ ID NO: 278950 - protein, 15 aa, Artificial Sequence
  Description of Artificial Sequence: Synthetic peptide
  Seed: HIHIFSFTGEEMATK
HIHFFSMTTEEGATK

SEQ ID NO: 278951 - protein, 15 aa, Artificial Sequence
  Description of Artificial Sequence: Synthetic peptide
  Seed: HIHIFSFTGEEMATK
HIHFFSMTTEEHATK

SEQ ID NO: 278952 - protein, 15 aa, Artificial Sequence
  Description of Artificial Sequence: Synthetic peptide
  Seed: HIHIFSFTGEEMATK
HIHFFSMTTEEIATK

SEQ ID NO: 278953 - protein, 15 aa, Artificial Sequence
  Description of Artificial Sequence: Synthetic peptide
  Seed: HIHIFSFTGEEMATK
HIHFFSMTTEEKATK

SEQ ID NO: 278954 - protein, 15 aa, Artificial Sequence
  Description of Artificial Sequence: Synthetic peptide
  Seed: HIHIFSFTGEEMATK
HIHFFSMTTEELATK

SEQ ID NO: 278955 - protein, 15 aa, Artificial Sequence
  Description of Artificial Sequence: Synthetic peptide
  Seed: HIHIFSFTGEEMATK
HIHFFSMTTEEMATK

SEQ ID NO: 278956 - protein, 15 aa, Artificial Sequence
  Description of Artificial Sequence: Synthetic peptide
  Seed: HIHIFSFTGEEMATK
HIHFFSMTTEENATK

SEQ ID NO: 278957 - protein, 15 aa, Artificial Sequence
  Description of Artificial Sequence: Synthetic peptide
  Seed: HIHIFSFTGEEMATK
HIHFFSMTTEEPATK

SEQ ID NO: 278958 - protein, 15 aa, Artificial Sequence
  Description of Artificial Sequence: Synthetic peptide
  Seed: HIHIFSFTGEEMATK
HIHFFSMTTEEQATK

SEQ ID NO: 278959 - protein, 15 aa, Artificial Sequence
  Description of Artificial Sequence: Synthetic peptide
  Seed: HIHIFSFTGEEMATK
HIHFFSMTTEERATK

SEQ ID NO: 278960 - protein, 15 aa, Artificial Sequence
  Description of Artificial Sequence: Synthetic peptide
  Seed: HIHIFSFTGEEMATK
HIHFFSMTTEESATK

SEQ ID NO: 278961 - protein, 15 aa, Artificial Sequence
  Description of Artificial Sequence: Synthetic peptide
  Seed: HIHIFSFTGEEMATK
HIHFFSMTTEETATK

SEQ ID NO: 278962 - protein, 15 aa, Artificial Sequence
  Description of Artificial Sequence: Synthetic peptide
  Seed: HIHIFSFTGEEMATK
HIHFFSMTTEEVATK

SEQ ID NO: 278963 - protein, 15 aa, Artificial Sequence
  Description of Artificial Sequence: Synthetic peptide
  Seed: HIHIFSFTGEEMATK
HIHFFSMTTEEWATK

SEQ ID NO: 278964 - protein, 15 aa, Artificial Sequence
  Description of Artificial Sequence: Synthetic peptide
  Seed: HIHIFSFTGEEMATK
HIHFFSMTTEEYATK

SEQ ID NO: 278965 - protein, 15 aa, Artificial Sequence
  Description of Artificial Sequence: Synthetic peptide
  Seed: HIHIFSFTGEEMATK
HIHFFSMTVEEAATK

SEQ ID NO: 278966 - protein, 15 aa, Artificial Sequence
  Description of Artificial Sequence: Synthetic peptide
  Seed: HIHIFSFTGEEMATK
HIHFFSMTVEECATK

SEQ ID NO: 278967 - protein, 15 aa, Artificial Sequence
  Description of Artificial Sequence: Synthetic peptide
  Seed: HIHIFSFTGEEMATK
HIHFFSMTVEEDATK

SEQ ID NO: 278968 - protein, 15 aa, Artificial Sequence
  Description of Artificial Sequence: Synthetic peptide
  Seed: HIHIFSFTGEEMATK
HIHFFSMTVEEEATK

SEQ ID NO: 278969 - protein, 15 aa, Artificial Sequence
  Description of Artificial Sequence: Synthetic peptide
  Seed: HIHIFSFTGEEMATK
HIHFFSMTVEEFATK

SEQ ID NO: 278970 - protein, 15 aa, Artificial Sequence
  Description of Artificial Sequence: Synthetic peptide
  Seed: HIHIFSFTGEEMATK
HIHFFSMTVEEGATK

SEQ ID NO: 278971 - protein, 15 aa, Artificial Sequence
  Description of Artificial Sequence: Synthetic peptide
  Seed: HIHIFSFTGEEMATK
HIHFFSMTVEEHATK

SEQ ID NO: 278972 - protein, 15 aa, Artificial Sequence
  Description of Artificial Sequence: Synthetic peptide
  Seed: HIHIFSFTGEEMATK
HIHFFSMTVEEIATK

SEQ ID NO: 278973 - protein, 15 aa, Artificial Sequence
  Description of Artificial Sequence: Synthetic peptide
  Seed: HIHIFSFTGEEMATK
HIHFFSMTVEEKATK

SEQ ID NO: 278974 - protein, 15 aa, Artificial Sequence
  Description of Artificial Sequence: Synthetic peptide
  Seed: HIHIFSFTGEEMATK
HIHFFSMTVEELATK

SEQ ID NO: 278975 - protein, 15 aa, Artificial Sequence
  Description of Artificial Sequence: Synthetic peptide
  Seed: HIHIFSFTGEEMATK
HIHFFSMTVEEMATK

SEQ ID NO: 278976 - protein, 15 aa, Artificial Sequence
  Description of Artificial Sequence: Synthetic peptide
  Seed: HIHIFSFTGEEMATK
HIHFFSMTVEENATK

SEQ ID NO: 278977 - protein, 15 aa, Artificial Sequence
  Description of Artificial Sequence: Synthetic peptide
  Seed: HIHIFSFTGEEMATK
HIHFFSMTVEEPATK

SEQ ID NO: 278978 - protein, 15 aa, Artificial Sequence
  Description of Artificial Sequence: Synthetic peptide
  Seed: HIHIFSFTGEEMATK
HIHFFSMTVEEQATK

SEQ ID NO: 278979 - protein, 15 aa, Artificial Sequence
  Description of Artificial Sequence: Synthetic peptide
  Seed: HIHIFSFTGEEMATK
HIHFFSMTVEERATK

SEQ ID NO: 278980 - protein, 15 aa, Artificial Sequence
  Description of Artificial Sequence: Synthetic peptide
  Seed: HIHIFSFTGEEMATK
HIHFFSMTVEESATK

SEQ ID NO: 278981 - protein, 15 aa, Artificial Sequence
  Description of Artificial Sequence: Synthetic peptide
  Seed: HIHIFSFTGEEMATK
HIHFFSMTVEETATK

SEQ ID NO: 278982 - protein, 15 aa, Artificial Sequence
  Description of Artificial Sequence: Synthetic peptide
  Seed: HIHIFSFTGEEMATK
HIHFFSMTVEEVATK

SEQ ID NO: 278983 - protein, 15 aa, Artificial Sequence
  Description of Artificial Sequence: Synthetic peptide
  Seed: HIHIFSFTGEEMATK
HIHFFSMTVEEYATK

SEQ ID NO: 278984 - protein, 15 aa, Artificial Sequence
  Description of Artificial Sequence: Synthetic peptide
  Seed: HIHIFSFTGEEMATK
HIHFFSMTWEEAATK

SEQ ID NO: 278985 - protein, 15 aa, Artificial Sequence
  Description of Artificial Sequence: Synthetic peptide
  Seed: HIHIFSFTGEEMATK
HIHFFSMTWEEFATK

SEQ ID NO: 278986 - protein, 15 aa, Artificial Sequence
  Description of Artificial Sequence: Synthetic peptide
  Seed: HIHIFSFTGEEMATK
HIHFFSMTWEEIATK

SEQ ID NO: 278987 - protein, 15 aa, Artificial Sequence
  Description of Artificial Sequence: Synthetic peptide
  Seed: HIHIFSFTGEEMATK
HIHFFSMTWEELATK

SEQ ID NO: 278988 - protein, 15 aa, Artificial Sequence
  Description of Artificial Sequence: Synthetic peptide
  Seed: HIHIFSFTGEEMATK
HIHFFSMTWEEMATK

SEQ ID NO: 278989 - protein, 15 aa, Artificial Sequence
  Description of Artificial Sequence: Synthetic peptide
  Seed: HIHIFSFTGEEMATK
HIHFFSMTWEESATK

SEQ ID NO: 278990 - protein, 15 aa, Artificial Sequence
  Description of Artificial Sequence: Synthetic peptide
  Seed: HIHIFSFTGEEMATK
HIHFFSMTWEETATK

SEQ ID NO: 278991 - protein, 15 aa, Artificial Sequence
  Description of Artificial Sequence: Synthetic peptide
  Seed: HIHIFSFTGEEMATK
HIHFFSMTWEEVATK

SEQ ID NO: 278992 - protein, 15 aa, Artificial Sequence
  Description of Artificial Sequence: Synthetic peptide
  Seed: HIHIFSFTGEEMATK
HIHFFSMTWEEYATK

SEQ ID NO: 278993 - protein, 15 aa, Artificial Sequence
  Description of Artificial Sequence: Synthetic peptide
  Seed: HIHIFSFTGEEMATK
HIHFFSMTYEEAATK

SEQ ID NO: 278994 - protein, 15 aa, Artificial Sequence
  Description of Artificial Sequence: Synthetic peptide
  Seed: HIHIFSFTGEEMATK
HIHFFSMTYEEFATK

SEQ ID NO: 278995 - protein, 15 aa, Artificial Sequence
  Description of Artificial Sequence: Synthetic peptide
  Seed: HIHIFSFTGEEMATK
HIHFFSMTYEEIATK

SEQ ID NO: 278996 - protein, 15 aa, Artificial Sequence
  Description of Artificial Sequence: Synthetic peptide
  Seed: HIHIFSFTGEEMATK
HIHFFSMTYEELATK

SEQ ID NO: 278997 - protein, 15 aa, Artificial Sequence
  Description of Artificial Sequence: Synthetic peptide
  Seed: HIHIFSFTGEEMATK
HIHFFSMTYEEMATK

SEQ ID NO: 278998 - protein, 15 aa, Artificial Sequence
  Description of Artificial Sequence: Synthetic peptide
  Seed: HIHIFSFTGEEMATK
HIHFFSMTYEENATK

SEQ ID NO: 278999 - protein, 15 aa, Artificial Sequence
  Description of Artificial Sequence: Synthetic peptide
  Seed: HIHIFSFTGEEMATK
HIHFFSMTYEESATK

SEQ ID NO: 279000 - protein, 15 aa, Artificial Sequence
  Description of Artificial Sequence: Synthetic peptide
  Seed: HIHIFSFTGEEMATK
HIHFFSMTYEETATK

SEQ ID NO: 279001 - protein, 15 aa, Artificial Sequence
  Description of Artificial Sequence: Synthetic peptide
  Seed: HIHIFSFTGEEMATK
HIHFFSMTYEEVATK

SEQ ID NO: 279002 - protein, 15 aa, Artificial Sequence
  Description of Artificial Sequence: Synthetic peptide
  Seed: HIHIFSFTGEEMATK
HIHFFSMTYEEWATK

SEQ ID NO: 279003 - protein, 15 aa, Artificial Sequence
  Description of Artificial Sequence: Synthetic peptide
  Seed: HIHIFSFTGEEMATK
HIHFFSMTYEEYATK

SEQ ID NO: 279004 - protein, 15 aa, Artificial Sequence
  Description of Artificial Sequence: Synthetic peptide
  Seed: HIHIFSFTGEEMATK
HIHFFSNTAEEIATK

SEQ ID NO: 279005 - protein, 15 aa, Artificial Sequence
  Description of Artificial Sequence: Synthetic peptide
  Seed: HIHIFSFTGEEMATK
HIHFFSNTAEELATK

SEQ ID NO: 279006 - protein, 15 aa, Artificial Sequence
  Description of Artificial Sequence: Synthetic peptide
  Seed: HIHIFSFTGEEMATK
HIHFFSNTAEEVATK

SEQ ID NO: 279007 - protein, 15 aa, Artificial Sequence
  Description of Artificial Sequence: Synthetic peptide
  Seed: HIHIFSFTGEEMATK
HIHFFSNTFEEAATK

SEQ ID NO: 279008 - protein, 15 aa, Artificial Sequence
  Description of Artificial Sequence: Synthetic peptide
  Seed: HIHIFSFTGEEMATK
HIHFFSNTFEECATK

SEQ ID NO: 279009 - protein, 15 aa, Artificial Sequence
  Description of Artificial Sequence: Synthetic peptide
  Seed: HIHIFSFTGEEMATK
HIHFFSNTFEEDATK

SEQ ID NO: 279010 - protein, 15 aa, Artificial Sequence
  Description of Artificial Sequence: Synthetic peptide
  Seed: HIHIFSFTGEEMATK
HIHFFSNTFEEEATK

SEQ ID NO: 279011 - protein, 15 aa, Artificial Sequence
  Description of Artificial Sequence: Synthetic peptide
  Seed: HIHIFSFTGEEMATK
HIHFFSNTFEEFATK

SEQ ID NO: 279012 - protein, 15 aa, Artificial Sequence
  Description of Artificial Sequence: Synthetic peptide
  Seed: HIHIFSFTGEEMATK
HIHFFSNTFEEIATK

SEQ ID NO: 279013 - protein, 15 aa, Artificial Sequence
  Description of Artificial Sequence: Synthetic peptide
  Seed: HIHIFSFTGEEMATK
HIHFFSNTFEELATK

SEQ ID NO: 279014 - protein, 15 aa, Artificial Sequence
  Description of Artificial Sequence: Synthetic peptide
  Seed: HIHIFSFTGEEMATK
HIHFFSNTFEEMATK

SEQ ID NO: 279015 - protein, 15 aa, Artificial Sequence
  Description of Artificial Sequence: Synthetic peptide
  Seed: HIHIFSFTGEEMATK
HIHFFSNTFEENATK

SEQ ID NO: 279016 - protein, 15 aa, Artificial Sequence
  Description of Artificial Sequence: Synthetic peptide
  Seed: HIHIFSFTGEEMATK
HIHFFSNTFEEPATK

SEQ ID NO: 279017 - protein, 15 aa, Artificial Sequence
  Description of Artificial Sequence: Synthetic peptide
  Seed: HIHIFSFTGEEMATK
HIHFFSNTFEEQATK

SEQ ID NO: 279018 - protein, 15 aa, Artificial Sequence
  Description of Artificial Sequence: Synthetic peptide
  Seed: HIHIFSFTGEEMATK
HIHFFSNTFEESATK

SEQ ID NO: 279019 - protein, 15 aa, Artificial Sequence
  Description of Artificial Sequence: Synthetic peptide
  Seed: HIHIFSFTGEEMATK
HIHFFSNTFEETATK

SEQ ID NO: 279020 - protein, 15 aa, Artificial Sequence
  Description of Artificial Sequence: Synthetic peptide
  Seed: HIHIFSFTGEEMATK
HIHFFSNTFEEVATK

SEQ ID NO: 279021 - protein, 15 aa, Artificial Sequence
  Description of Artificial Sequence: Synthetic peptide
  Seed: HIHIFSFTGEEMATK
HIHFFSNTFEEWATK

SEQ ID NO: 279022 - protein, 15 aa, Artificial Sequence
  Description of Artificial Sequence: Synthetic peptide
  Seed: HIHIFSFTGEEMATK
HIHFFSNTFEEYATK

SEQ ID NO: 279023 - protein, 15 aa, Artificial Sequence
  Description of Artificial Sequence: Synthetic peptide
  Seed: HIHIFSFTGEEMATK
HIHFFSNTIEEFATK

SEQ ID NO: 279024 - protein, 15 aa, Artificial Sequence
  Description of Artificial Sequence: Synthetic peptide
  Seed: HIHIFSFTGEEMATK
HIHFFSNTIEEIATK

SEQ ID NO: 279025 - protein, 15 aa, Artificial Sequence
  Description of Artificial Sequence: Synthetic peptide
  Seed: HIHIFSFTGEEMATK
HIHFFSNTIEELATK

SEQ ID NO: 279026 - protein, 15 aa, Artificial Sequence
  Description of Artificial Sequence: Synthetic peptide
  Seed: HIHIFSFTGEEMATK
HIHFFSNTIEEVATK

SEQ ID NO: 279027 - protein, 15 aa, Artificial Sequence
  Description of Artificial Sequence: Synthetic peptide
  Seed: HIHIFSFTGEEMATK
HIHFFSNTLEEFATK

SEQ ID NO: 279028 - protein, 15 aa, Artificial Sequence
  Description of Artificial Sequence: Synthetic peptide
  Seed: HIHIFSFTGEEMATK
HIHFFSNTLEEIATK

SEQ ID NO: 279029 - protein, 15 aa, Artificial Sequence
  Description of Artificial Sequence: Synthetic peptide
  Seed: HIHIFSFTGEEMATK
HIHFFSNTLEELATK

SEQ ID NO: 279030 - protein, 15 aa, Artificial Sequence
  Description of Artificial Sequence: Synthetic peptide
  Seed: HIHIFSFTGEEMATK
HIHFFSNTLEEMATK

SEQ ID NO: 279031 - protein, 15 aa, Artificial Sequence
  Description of Artificial Sequence: Synthetic peptide
  Seed: HIHIFSFTGEEMATK
HIHFFSNTLEEVATK

SEQ ID NO: 279032 - protein, 15 aa, Artificial Sequence
  Description of Artificial Sequence: Synthetic peptide
  Seed: HIHIFSFTGEEMATK
HIHFFSNTMEEIATK

SEQ ID NO: 279033 - protein, 15 aa, Artificial Sequence
  Description of Artificial Sequence: Synthetic peptide
  Seed: HIHIFSFTGEEMATK
HIHFFSNTMEELATK

SEQ ID NO: 279034 - protein, 15 aa, Artificial Sequence
  Description of Artificial Sequence: Synthetic peptide
  Seed: HIHIFSFTGEEMATK
HIHFFSNTMEEVATK

SEQ ID NO: 279035 - protein, 15 aa, Artificial Sequence
  Description of Artificial Sequence: Synthetic peptide
  Seed: HIHIFSFTGEEMATK
HIHFFSNTWEEFATK

SEQ ID NO: 279036 - protein, 15 aa, Artificial Sequence
  Description of Artificial Sequence: Synthetic peptide
  Seed: HIHIFSFTGEEMATK
HIHFFSNTWEEIATK

SEQ ID NO: 279037 - protein, 15 aa, Artificial Sequence
  Description of Artificial Sequence: Synthetic peptide
  Seed: HIHIFSFTGEEMATK
HIHFFSNTWEELATK

SEQ ID NO: 279038 - protein, 15 aa, Artificial Sequence
  Description of Artificial Sequence: Synthetic peptide
  Seed: HIHIFSFTGEEMATK
HIHFFSNTWEEVATK

SEQ ID NO: 279039 - protein, 15 aa, Artificial Sequence
  Description of Artificial Sequence: Synthetic peptide
  Seed: HIHIFSFTGEEMATK
HIHFFSNTYEEFATK

SEQ ID NO: 279040 - protein, 15 aa, Artificial Sequence
  Description of Artificial Sequence: Synthetic peptide
  Seed: HIHIFSFTGEEMATK
HIHFFSNTYEEIATK

SEQ ID NO: 279041 - protein, 15 aa, Artificial Sequence
  Description of Artificial Sequence: Synthetic peptide
  Seed: HIHIFSFTGEEMATK
HIHFFSNTYEELATK

SEQ ID NO: 279042 - protein, 15 aa, Artificial Sequence
  Description of Artificial Sequence: Synthetic peptide
  Seed: HIHIFSFTGEEMATK
HIHFFSNTYEEMATK

SEQ ID NO: 279043 - protein, 15 aa, Artificial Sequence
  Description of Artificial Sequence: Synthetic peptide
  Seed: HIHIFSFTGEEMATK
HIHFFSNTYEEVATK

SEQ ID NO: 279044 - protein, 15 aa, Artificial Sequence
  Description of Artificial Sequence: Synthetic peptide
  Seed: HIHIFSFTGEEMATK
HIHFFSPTFEEFATK

SEQ ID NO: 279045 - protein, 15 aa, Artificial Sequence
  Description of Artificial Sequence: Synthetic peptide
  Seed: HIHIFSFTGEEMATK
HIHFFSPTFEEIATK

SEQ ID NO: 279046 - protein, 15 aa, Artificial Sequence
  Description of Artificial Sequence: Synthetic peptide
  Seed: HIHIFSFTGEEMATK
HIHFFSPTFEELATK

SEQ ID NO: 279047 - protein, 15 aa, Artificial Sequence
  Description of Artificial Sequence: Synthetic peptide
  Seed: HIHIFSFTGEEMATK
HIHFFSPTFEEMATK

SEQ ID NO: 279048 - protein, 15 aa, Artificial Sequence
  Description of Artificial Sequence: Synthetic peptide
  Seed: HIHIFSFTGEEMATK
HIHFFSPTFEEVATK

SEQ ID NO: 279049 - protein, 15 aa, Artificial Sequence
  Description of Artificial Sequence: Synthetic peptide
  Seed: HIHIFSFTGEEMATK
HIHFFSPTLEELATK

SEQ ID NO: 279050 - protein, 15 aa, Artificial Sequence
  Description of Artificial Sequence: Synthetic peptide
  Seed: HIHIFSFTGEEMATK
HIHFFSQTAEEAATK

SEQ ID NO: 279051 - protein, 15 aa, Artificial Sequence
  Description of Artificial Sequence: Synthetic peptide
  Seed: HIHIFSFTGEEMATK
HIHFFSQTAEEGATK

SEQ ID NO: 279052 - protein, 15 aa, Artificial Sequence
  Description of Artificial Sequence: Synthetic peptide
  Seed: HIHIFSFTGEEMATK
HIHFFSQTAEEHATK

SEQ ID NO: 279053 - protein, 15 aa, Artificial Sequence
  Description of Artificial Sequence: Synthetic peptide
  Seed: HIHIFSFTGEEMATK
HIHFFSQTAEEIATK

SEQ ID NO: 279054 - protein, 15 aa, Artificial Sequence
  Description of Artificial Sequence: Synthetic peptide
  Seed: HIHIFSFTGEEMATK
HIHFFSQTAEELATK

SEQ ID NO: 279055 - protein, 15 aa, Artificial Sequence
  Description of Artificial Sequence: Synthetic peptide
  Seed: HIHIFSFTGEEMATK
HIHFFSQTAEEMATK

SEQ ID NO: 279056 - protein, 15 aa, Artificial Sequence
  Description of Artificial Sequence: Synthetic peptide
  Seed: HIHIFSFTGEEMATK
HIHFFSQTAEENATK

SEQ ID NO: 279057 - protein, 15 aa, Artificial Sequence
  Description of Artificial Sequence: Synthetic peptide
  Seed: HIHIFSFTGEEMATK
HIHFFSQTAEEQATK

SEQ ID NO: 279058 - protein, 15 aa, Artificial Sequence
  Description of Artificial Sequence: Synthetic peptide
  Seed: HIHIFSFTGEEMATK
HIHFFSQTAEESATK

SEQ ID NO: 279059 - protein, 15 aa, Artificial Sequence
  Description of Artificial Sequence: Synthetic peptide
  Seed: HIHIFSFTGEEMATK
HIHFFSQTAEETATK

SEQ ID NO: 279060 - protein, 15 aa, Artificial Sequence
  Description of Artificial Sequence: Synthetic peptide
  Seed: HIHIFSFTGEEMATK
HIHFFSQTAEEVATK

SEQ ID NO: 279061 - protein, 15 aa, Artificial Sequence
  Description of Artificial Sequence: Synthetic peptide
  Seed: HIHIFSFTGEEMATK
HIHFFSQTFEEAATK

SEQ ID NO: 279062 - protein, 15 aa, Artificial Sequence
  Description of Artificial Sequence: Synthetic peptide
  Seed: HIHIFSFTGEEMATK
HIHFFSQTFEECATK

SEQ ID NO: 279063 - protein, 15 aa, Artificial Sequence
  Description of Artificial Sequence: Synthetic peptide
  Seed: HIHIFSFTGEEMATK
HIHFFSQTFEEDATK

SEQ ID NO: 279064 - protein, 15 aa, Artificial Sequence
  Description of Artificial Sequence: Synthetic peptide
  Seed: HIHIFSFTGEEMATK
HIHFFSQTFEEEATK

SEQ ID NO: 279065 - protein, 15 aa, Artificial Sequence
  Description of Artificial Sequence: Synthetic peptide
  Seed: HIHIFSFTGEEMATK
HIHFFSQTFEEFATK

SEQ ID NO: 279066 - protein, 15 aa, Artificial Sequence
  Description of Artificial Sequence: Synthetic peptide
  Seed: HIHIFSFTGEEMATK
HIHFFSQTFEEHATK

SEQ ID NO: 279067 - protein, 15 aa, Artificial Sequence
  Description of Artificial Sequence: Synthetic peptide
  Seed: HIHIFSFTGEEMATK
HIHFFSQTFEEIATK

SEQ ID NO: 279068 - protein, 15 aa, Artificial Sequence
  Description of Artificial Sequence: Synthetic peptide
  Seed: HIHIFSFTGEEMATK
HIHFFSQTFEELATK

SEQ ID NO: 279069 - protein, 15 aa, Artificial Sequence
  Description of Artificial Sequence: Synthetic peptide
  Seed: HIHIFSFTGEEMATK
HIHFFSQTFEEMATK

SEQ ID NO: 279070 - protein, 15 aa, Artificial Sequence
  Description of Artificial Sequence: Synthetic peptide
  Seed: HIHIFSFTGEEMATK
HIHFFSQTFEENATK

SEQ ID NO: 279071 - protein, 15 aa, Artificial Sequence
  Description of Artificial Sequence: Synthetic peptide
  Seed: HIHIFSFTGEEMATK
HIHFFSQTFEEPATK

SEQ ID NO: 279072 - protein, 15 aa, Artificial Sequence
  Description of Artificial Sequence: Synthetic peptide
  Seed: HIHIFSFTGEEMATK
HIHFFSQTFEEQATK

SEQ ID NO: 279073 - protein, 15 aa, Artificial Sequence
  Description of Artificial Sequence: Synthetic peptide
  Seed: HIHIFSFTGEEMATK
HIHFFSQTFEERATK

SEQ ID NO: 279074 - protein, 15 aa, Artificial Sequence
  Description of Artificial Sequence: Synthetic peptide
  Seed: HIHIFSFTGEEMATK
HIHFFSQTFEESATK

SEQ ID NO: 279075 - protein, 15 aa, Artificial Sequence
  Description of Artificial Sequence: Synthetic peptide
  Seed: HIHIFSFTGEEMATK
HIHFFSQTFEETATK

SEQ ID NO: 279076 - protein, 15 aa, Artificial Sequence
  Description of Artificial Sequence: Synthetic peptide
  Seed: HIHIFSFTGEEMATK
HIHFFSQTFEEVATK

SEQ ID NO: 279077 - protein, 15 aa, Artificial Sequence
  Description of Artificial Sequence: Synthetic peptide
  Seed: HIHIFSFTGEEMATK
HIHFFSQTFEEWATK

SEQ ID NO: 279078 - protein, 15 aa, Artificial Sequence
  Description of Artificial Sequence: Synthetic peptide
  Seed: HIHIFSFTGEEMATK
HIHFFSQTFEEYATK

SEQ ID NO: 279079 - protein, 15 aa, Artificial Sequence
  Description of Artificial Sequence: Synthetic peptide
  Seed: HIHIFSFTGEEMATK
HIHFFSQTGEEAATK

SEQ ID NO: 279080 - protein, 15 aa, Artificial Sequence
  Description of Artificial Sequence: Synthetic peptide
  Seed: HIHIFSFTGEEMATK
HIHFFSQTGEEIATK

SEQ ID NO: 279081 - protein, 15 aa, Artificial Sequence
  Description of Artificial Sequence: Synthetic peptide
  Seed: HIHIFSFTGEEMATK
HIHFFSQTGEELATK

SEQ ID NO: 279082 - protein, 15 aa, Artificial Sequence
  Description of Artificial Sequence: Synthetic peptide
  Seed: HIHIFSFTGEEMATK
HIHFFSQTGEEMATK

SEQ ID NO: 279083 - protein, 15 aa, Artificial Sequence
  Description of Artificial Sequence: Synthetic peptide
  Seed: HIHIFSFTGEEMATK
HIHFFSQTGEESATK

SEQ ID NO: 279084 - protein, 15 aa, Artificial Sequence
  Description of Artificial Sequence: Synthetic peptide
  Seed: HIHIFSFTGEEMATK
HIHFFSQTGEETATK

SEQ ID NO: 279085 - protein, 15 aa, Artificial Sequence
  Description of Artificial Sequence: Synthetic peptide
  Seed: HIHIFSFTGEEMATK
HIHFFSQTGEEVATK

SEQ ID NO: 279086 - protein, 15 aa, Artificial Sequence
  Description of Artificial Sequence: Synthetic peptide
  Seed: HIHIFSFTGEEMATK
HIHFFSQTIEEAATK

SEQ ID NO: 279087 - protein, 15 aa, Artificial Sequence
  Description of Artificial Sequence: Synthetic peptide
  Seed: HIHIFSFTGEEMATK
HIHFFSQTIEEFATK

SEQ ID NO: 279088 - protein, 15 aa, Artificial Sequence
  Description of Artificial Sequence: Synthetic peptide
  Seed: HIHIFSFTGEEMATK
HIHFFSQTIEEIATK

SEQ ID NO: 279089 - protein, 15 aa, Artificial Sequence
  Description of Artificial Sequence: Synthetic peptide
  Seed: HIHIFSFTGEEMATK
HIHFFSQTIEELATK

SEQ ID NO: 279090 - protein, 15 aa, Artificial Sequence
  Description of Artificial Sequence: Synthetic peptide
  Seed: HIHIFSFTGEEMATK
HIHFFSQTIEEMATK

SEQ ID NO: 279091 - protein, 15 aa, Artificial Sequence
  Description of Artificial Sequence: Synthetic peptide
  Seed: HIHIFSFTGEEMATK
HIHFFSQTIEENATK

SEQ ID NO: 279092 - protein, 15 aa, Artificial Sequence
  Description of Artificial Sequence: Synthetic peptide
  Seed: HIHIFSFTGEEMATK
HIHFFSQTIEESATK

SEQ ID NO: 279093 - protein, 15 aa, Artificial Sequence
  Description of Artificial Sequence: Synthetic peptide
  Seed: HIHIFSFTGEEMATK
HIHFFSQTIEETATK

SEQ ID NO: 279094 - protein, 15 aa, Artificial Sequence
  Description of Artificial Sequence: Synthetic peptide
  Seed: HIHIFSFTGEEMATK
HIHFFSQTIEEVATK

SEQ ID NO: 279095 - protein, 15 aa, Artificial Sequence
  Description of Artificial Sequence: Synthetic peptide
  Seed: HIHIFSFTGEEMATK
HIHFFSQTLEEFATK

SEQ ID NO: 279096 - protein, 15 aa, Artificial Sequence
  Description of Artificial Sequence: Synthetic peptide
  Seed: HIHIFSFTGEEMATK
HIHFFSQTLEEIATK

SEQ ID NO: 279097 - protein, 15 aa, Artificial Sequence
  Description of Artificial Sequence: Synthetic peptide
  Seed: HIHIFSFTGEEMATK
HIHFFSQTLEELATK

SEQ ID NO: 279098 - protein, 15 aa, Artificial Sequence
  Description of Artificial Sequence: Synthetic peptide
  Seed: HIHIFSFTGEEMATK
HIHFFSQTLEEMATK

SEQ ID NO: 279099 - protein, 15 aa, Artificial Sequence
  Description of Artificial Sequence: Synthetic peptide
  Seed: HIHIFSFTGEEMATK
HIHFFSQTLEETATK

SEQ ID NO: 279100 - protein, 15 aa, Artificial Sequence
  Description of Artificial Sequence: Synthetic peptide
  Seed: HIHIFSFTGEEMATK
HIHFFSQTLEEVATK

SEQ ID NO: 279101 - protein, 15 aa, Artificial Sequence
  Description of Artificial Sequence: Synthetic peptide
  Seed: HIHIFSFTGEEMATK
HIHFFSQTLEEYATK

SEQ ID NO: 279102 - protein, 15 aa, Artificial Sequence
  Description of Artificial Sequence: Synthetic peptide
  Seed: HIHIFSFTGEEMATK
HIHFFSQTMEEFATK

SEQ ID NO: 279103 - protein, 15 aa, Artificial Sequence
  Description of Artificial Sequence: Synthetic peptide
  Seed: HIHIFSFTGEEMATK
HIHFFSQTMEEIATK

SEQ ID NO: 279104 - protein, 15 aa, Artificial Sequence
  Description of Artificial Sequence: Synthetic peptide
  Seed: HIHIFSFTGEEMATK
HIHFFSQTMEELATK

SEQ ID NO: 279105 - protein, 15 aa, Artificial Sequence
  Description of Artificial Sequence: Synthetic peptide
  Seed: HIHIFSFTGEEMATK
HIHFFSQTMEEMATK

SEQ ID NO: 279106 - protein, 15 aa, Artificial Sequence
  Description of Artificial Sequence: Synthetic peptide
  Seed: HIHIFSFTGEEMATK
HIHFFSQTMEEVATK

SEQ ID NO: 279107 - protein, 15 aa, Artificial Sequence
  Description of Artificial Sequence: Synthetic peptide
  Seed: HIHIFSFTGEEMATK
HIHFFSQTNEEAATK

SEQ ID NO: 279108 - protein, 15 aa, Artificial Sequence
  Description of Artificial Sequence: Synthetic peptide
  Seed: HIHIFSFTGEEMATK
HIHFFSQTNEEIATK

SEQ ID NO: 279109 - protein, 15 aa, Artificial Sequence
  Description of Artificial Sequence: Synthetic peptide
  Seed: HIHIFSFTGEEMATK
HIHFFSQTNEELATK

SEQ ID NO: 279110 - protein, 15 aa, Artificial Sequence
  Description of Artificial Sequence: Synthetic peptide
  Seed: HIHIFSFTGEEMATK
HIHFFSQTNEEVATK

SEQ ID NO: 279111 - protein, 15 aa, Artificial Sequence
  Description of Artificial Sequence: Synthetic peptide
  Seed: HIHIFSFTGEEMATK
HIHFFSQTPEEAATK

SEQ ID NO: 279112 - protein, 15 aa, Artificial Sequence
  Description of Artificial Sequence: Synthetic peptide
  Seed: HIHIFSFTGEEMATK
HIHFFSQTPEEIATK

SEQ ID NO: 279113 - protein, 15 aa, Artificial Sequence
  Description of Artificial Sequence: Synthetic peptide
  Seed: HIHIFSFTGEEMATK
HIHFFSQTPEELATK

SEQ ID NO: 279114 - protein, 15 aa, Artificial Sequence
  Description of Artificial Sequence: Synthetic peptide
  Seed: HIHIFSFTGEEMATK
HIHFFSQTPEEMATK

SEQ ID NO: 279115 - protein, 15 aa, Artificial Sequence
  Description of Artificial Sequence: Synthetic peptide
  Seed: HIHIFSFTGEEMATK
HIHFFSQTPEENATK

SEQ ID NO: 279116 - protein, 15 aa, Artificial Sequence
  Description of Artificial Sequence: Synthetic peptide
  Seed: HIHIFSFTGEEMATK
HIHFFSQTPEESATK

SEQ ID NO: 279117 - protein, 15 aa, Artificial Sequence
  Description of Artificial Sequence: Synthetic peptide
  Seed: HIHIFSFTGEEMATK
HIHFFSQTPEETATK

SEQ ID NO: 279118 - protein, 15 aa, Artificial Sequence
  Description of Artificial Sequence: Synthetic peptide
  Seed: HIHIFSFTGEEMATK
HIHFFSQTPEEVATK

SEQ ID NO: 279119 - protein, 15 aa, Artificial Sequence
  Description of Artificial Sequence: Synthetic peptide
  Seed: HIHIFSFTGEEMATK
HIHFFSQTSEEAATK

SEQ ID NO: 279120 - protein, 15 aa, Artificial Sequence
  Description of Artificial Sequence: Synthetic peptide
  Seed: HIHIFSFTGEEMATK
HIHFFSQTSEEIATK

SEQ ID NO: 279121 - protein, 15 aa, Artificial Sequence
  Description of Artificial Sequence: Synthetic peptide
  Seed: HIHIFSFTGEEMATK
HIHFFSQTSEELATK

SEQ ID NO: 279122 - protein, 15 aa, Artificial Sequence
  Description of Artificial Sequence: Synthetic peptide
  Seed: HIHIFSFTGEEMATK
HIHFFSQTSEEMATK

SEQ ID NO: 279123 - protein, 15 aa, Artificial Sequence
  Description of Artificial Sequence: Synthetic peptide
  Seed: HIHIFSFTGEEMATK
HIHFFSQTSEENATK

SEQ ID NO: 279124 - protein, 15 aa, Artificial Sequence
  Description of Artificial Sequence: Synthetic peptide
  Seed: HIHIFSFTGEEMATK
HIHFFSQTSEESATK

SEQ ID NO: 279125 - protein, 15 aa, Artificial Sequence
  Description of Artificial Sequence: Synthetic peptide
  Seed: HIHIFSFTGEEMATK
HIHFFSQTSEETATK

SEQ ID NO: 279126 - protein, 15 aa, Artificial Sequence
  Description of Artificial Sequence: Synthetic peptide
  Seed: HIHIFSFTGEEMATK
HIHFFSQTSEEVATK

SEQ ID NO: 279127 - protein, 15 aa, Artificial Sequence
  Description of Artificial Sequence: Synthetic peptide
  Seed: HIHIFSFTGEEMATK
HIHFFSQTTEEAATK

SEQ ID NO: 279128 - protein, 15 aa, Artificial Sequence
  Description of Artificial Sequence: Synthetic peptide
  Seed: HIHIFSFTGEEMATK
HIHFFSQTTEEIATK

SEQ ID NO: 279129 - protein, 15 aa, Artificial Sequence
  Description of Artificial Sequence: Synthetic peptide
  Seed: HIHIFSFTGEEMATK
HIHFFSQTTEELATK

SEQ ID NO: 279130 - protein, 15 aa, Artificial Sequence
  Description of Artificial Sequence: Synthetic peptide
  Seed: HIHIFSFTGEEMATK
HIHFFSQTTEEMATK

SEQ ID NO: 279131 - protein, 15 aa, Artificial Sequence
  Description of Artificial Sequence: Synthetic peptide
  Seed: HIHIFSFTGEEMATK
HIHFFSQTTEENATK

SEQ ID NO: 279132 - protein, 15 aa, Artificial Sequence
  Description of Artificial Sequence: Synthetic peptide
  Seed: HIHIFSFTGEEMATK
HIHFFSQTTEESATK

SEQ ID NO: 279133 - protein, 15 aa, Artificial Sequence
  Description of Artificial Sequence: Synthetic peptide
  Seed: HIHIFSFTGEEMATK
HIHFFSQTTEETATK

SEQ ID NO: 279134 - protein, 15 aa, Artificial Sequence
  Description of Artificial Sequence: Synthetic peptide
  Seed: HIHIFSFTGEEMATK
HIHFFSQTTEEVATK

SEQ ID NO: 279135 - protein, 15 aa, Artificial Sequence
  Description of Artificial Sequence: Synthetic peptide
  Seed: HIHIFSFTGEEMATK
HIHFFSQTVEEAATK

SEQ ID NO: 279136 - protein, 15 aa, Artificial Sequence
  Description of Artificial Sequence: Synthetic peptide
  Seed: HIHIFSFTGEEMATK
HIHFFSQTVEEFATK

SEQ ID NO: 279137 - protein, 15 aa, Artificial Sequence
  Description of Artificial Sequence: Synthetic peptide
  Seed: HIHIFSFTGEEMATK
HIHFFSQTVEEIATK

SEQ ID NO: 279138 - protein, 15 aa, Artificial Sequence
  Description of Artificial Sequence: Synthetic peptide
  Seed: HIHIFSFTGEEMATK
HIHFFSQTVEELATK

SEQ ID NO: 279139 - protein, 15 aa, Artificial Sequence
  Description of Artificial Sequence: Synthetic peptide
  Seed: HIHIFSFTGEEMATK
HIHFFSQTVEEMATK

SEQ ID NO: 279140 - protein, 15 aa, Artificial Sequence
  Description of Artificial Sequence: Synthetic peptide
  Seed: HIHIFSFTGEEMATK
HIHFFSQTVEENATK

SEQ ID NO: 279141 - protein, 15 aa, Artificial Sequence
  Description of Artificial Sequence: Synthetic peptide
  Seed: HIHIFSFTGEEMATK
HIHFFSQTVEESATK

SEQ ID NO: 279142 - protein, 15 aa, Artificial Sequence
  Description of Artificial Sequence: Synthetic peptide
  Seed: HIHIFSFTGEEMATK
HIHFFSQTVEETATK

SEQ ID NO: 279143 - protein, 15 aa, Artificial Sequence
  Description of Artificial Sequence: Synthetic peptide
  Seed: HIHIFSFTGEEMATK
HIHFFSQTVEEVATK

SEQ ID NO: 279144 - protein, 15 aa, Artificial Sequence
  Description of Artificial Sequence: Synthetic peptide
  Seed: HIHIFSFTGEEMATK
HIHFFSQTWEEFATK

SEQ ID NO: 279145 - protein, 15 aa, Artificial Sequence
  Description of Artificial Sequence: Synthetic peptide
  Seed: HIHIFSFTGEEMATK
HIHFFSQTWEEIATK

SEQ ID NO: 279146 - protein, 15 aa, Artificial Sequence
  Description of Artificial Sequence: Synthetic peptide
  Seed: HIHIFSFTGEEMATK
HIHFFSQTWEELATK

SEQ ID NO: 279147 - protein, 15 aa, Artificial Sequence
  Description of Artificial Sequence: Synthetic peptide
  Seed: HIHIFSFTGEEMATK
HIHFFSQTWEEMATK

SEQ ID NO: 279148 - protein, 15 aa, Artificial Sequence
  Description of Artificial Sequence: Synthetic peptide
  Seed: HIHIFSFTGEEMATK
HIHFFSQTWEEVATK

SEQ ID NO: 279149 - protein, 15 aa, Artificial Sequence
  Description of Artificial Sequence: Synthetic peptide
  Seed: HIHIFSFTGEEMATK
HIHFFSQTWEEYATK

SEQ ID NO: 279150 - protein, 15 aa, Artificial Sequence
  Description of Artificial Sequence: Synthetic peptide
  Seed: HIHIFSFTGEEMATK
HIHFFSQTYEEFATK

SEQ ID NO: 279151 - protein, 15 aa, Artificial Sequence
  Description of Artificial Sequence: Synthetic peptide
  Seed: HIHIFSFTGEEMATK
HIHFFSQTYEEIATK

SEQ ID NO: 279152 - protein, 15 aa, Artificial Sequence
  Description of Artificial Sequence: Synthetic peptide
  Seed: HIHIFSFTGEEMATK
HIHFFSQTYEELATK

SEQ ID NO: 279153 - protein, 15 aa, Artificial Sequence
  Description of Artificial Sequence: Synthetic peptide
  Seed: HIHIFSFTGEEMATK
HIHFFSQTYEEMATK

SEQ ID NO: 279154 - protein, 15 aa, Artificial Sequence
  Description of Artificial Sequence: Synthetic peptide
  Seed: HIHIFSFTGEEMATK
HIHFFSQTYEEVATK

SEQ ID NO: 279155 - protein, 15 aa, Artificial Sequence
  Description of Artificial Sequence: Synthetic peptide
  Seed: HIHIFSFTGEEMATK
HIHFFSQTYEEYATK

SEQ ID NO: 279156 - protein, 15 aa, Artificial Sequence
  Description of Artificial Sequence: Synthetic peptide
  Seed: HIHIFSFTGEEMATK
HIHFFSRTFEEAATK

SEQ ID NO: 279157 - protein, 15 aa, Artificial Sequence
  Description of Artificial Sequence: Synthetic peptide
  Seed: HIHIFSFTGEEMATK
HIHFFSRTFEEFATK

SEQ ID NO: 279158 - protein, 15 aa, Artificial Sequence
  Description of Artificial Sequence: Synthetic peptide
  Seed: HIHIFSFTGEEMATK
HIHFFSRTFEEIATK

SEQ ID NO: 279159 - protein, 15 aa, Artificial Sequence
  Description of Artificial Sequence: Synthetic peptide
  Seed: HIHIFSFTGEEMATK
HIHFFSRTFEELATK

SEQ ID NO: 279160 - protein, 15 aa, Artificial Sequence
  Description of Artificial Sequence: Synthetic peptide
  Seed: HIHIFSFTGEEMATK
HIHFFSRTFEEMATK

SEQ ID NO: 279161 - protein, 15 aa, Artificial Sequence
  Description of Artificial Sequence: Synthetic peptide
  Seed: HIHIFSFTGEEMATK
HIHFFSRTFEENATK

SEQ ID NO: 279162 - protein, 15 aa, Artificial Sequence
  Description of Artificial Sequence: Synthetic peptide
  Seed: HIHIFSFTGEEMATK
HIHFFSRTFEESATK

SEQ ID NO: 279163 - protein, 15 aa, Artificial Sequence
  Description of Artificial Sequence: Synthetic peptide
  Seed: HIHIFSFTGEEMATK
HIHFFSRTFEETATK

SEQ ID NO: 279164 - protein, 15 aa, Artificial Sequence
  Description of Artificial Sequence: Synthetic peptide
  Seed: HIHIFSFTGEEMATK
HIHFFSRTFEEVATK

SEQ ID NO: 279165 - protein, 15 aa, Artificial Sequence
  Description of Artificial Sequence: Synthetic peptide
  Seed: HIHIFSFTGEEMATK
HIHFFSRTFEEYATK

SEQ ID NO: 279166 - protein, 15 aa, Artificial Sequence
  Description of Artificial Sequence: Synthetic peptide
  Seed: HIHIFSFTGEEMATK
HIHFFSRTIEEFATK

SEQ ID NO: 279167 - protein, 15 aa, Artificial Sequence
  Description of Artificial Sequence: Synthetic peptide
  Seed: HIHIFSFTGEEMATK
HIHFFSRTIEEIATK

SEQ ID NO: 279168 - protein, 15 aa, Artificial Sequence
  Description of Artificial Sequence: Synthetic peptide
  Seed: HIHIFSFTGEEMATK
HIHFFSRTIEELATK

SEQ ID NO: 279169 - protein, 15 aa, Artificial Sequence
  Description of Artificial Sequence: Synthetic peptide
  Seed: HIHIFSFTGEEMATK
HIHFFSRTIEEVATK

SEQ ID NO: 279170 - protein, 15 aa, Artificial Sequence
  Description of Artificial Sequence: Synthetic peptide
  Seed: HIHIFSFTGEEMATK
HIHFFSRTLEEFATK

SEQ ID NO: 279171 - protein, 15 aa, Artificial Sequence
  Description of Artificial Sequence: Synthetic peptide
  Seed: HIHIFSFTGEEMATK
HIHFFSRTLEEIATK

SEQ ID NO: 279172 - protein, 15 aa, Artificial Sequence
  Description of Artificial Sequence: Synthetic peptide
  Seed: HIHIFSFTGEEMATK
HIHFFSRTLEELATK

SEQ ID NO: 279173 - protein, 15 aa, Artificial Sequence
  Description of Artificial Sequence: Synthetic peptide
  Seed: HIHIFSFTGEEMATK
HIHFFSRTLEEMATK

SEQ ID NO: 279174 - protein, 15 aa, Artificial Sequence
  Description of Artificial Sequence: Synthetic peptide
  Seed: HIHIFSFTGEEMATK
HIHFFSRTLEEVATK

SEQ ID NO: 279175 - protein, 15 aa, Artificial Sequence
  Description of Artificial Sequence: Synthetic peptide
  Seed: HIHIFSFTGEEMATK
HIHFFSRTMEEIATK

SEQ ID NO: 279176 - protein, 15 aa, Artificial Sequence
  Description of Artificial Sequence: Synthetic peptide
  Seed: HIHIFSFTGEEMATK
HIHFFSRTMEELATK

SEQ ID NO: 279177 - protein, 15 aa, Artificial Sequence
  Description of Artificial Sequence: Synthetic peptide
  Seed: HIHIFSFTGEEMATK
HIHFFSRTWEEIATK

SEQ ID NO: 279178 - protein, 15 aa, Artificial Sequence
  Description of Artificial Sequence: Synthetic peptide
  Seed: HIHIFSFTGEEMATK
HIHFFSRTWEELATK

SEQ ID NO: 279179 - protein, 15 aa, Artificial Sequence
  Description of Artificial Sequence: Synthetic peptide
  Seed: HIHIFSFTGEEMATK
HIHFFSRTWEEVATK

SEQ ID NO: 279180 - protein, 15 aa, Artificial Sequence
  Description of Artificial Sequence: Synthetic peptide
  Seed: HIHIFSFTGEEMATK
HIHFFSRTYEEFATK

SEQ ID NO: 279181 - protein, 15 aa, Artificial Sequence
  Description of Artificial Sequence: Synthetic peptide
  Seed: HIHIFSFTGEEMATK
HIHFFSRTYEEIATK

SEQ ID NO: 279182 - protein, 15 aa, Artificial Sequence
  Description of Artificial Sequence: Synthetic peptide
  Seed: HIHIFSFTGEEMATK
HIHFFSRTYEELATK

SEQ ID NO: 279183 - protein, 15 aa, Artificial Sequence
  Description of Artificial Sequence: Synthetic peptide
  Seed: HIHIFSFTGEEMATK
HIHFFSRTYEEVATK

SEQ ID NO: 279184 - protein, 15 aa, Artificial Sequence
  Description of Artificial Sequence: Synthetic peptide
  Seed: HIHIFSFTGEEMATK
HIHFFSSTAEEAATK

SEQ ID NO: 279185 - protein, 15 aa, Artificial Sequence
  Description of Artificial Sequence: Synthetic peptide
  Seed: HIHIFSFTGEEMATK
HIHFFSSTAEEIATK

SEQ ID NO: 279186 - protein, 15 aa, Artificial Sequence
  Description of Artificial Sequence: Synthetic peptide
  Seed: HIHIFSFTGEEMATK
HIHFFSSTAEELATK

SEQ ID NO: 279187 - protein, 15 aa, Artificial Sequence
  Description of Artificial Sequence: Synthetic peptide
  Seed: HIHIFSFTGEEMATK
HIHFFSSTAEEMATK

SEQ ID NO: 279188 - protein, 15 aa, Artificial Sequence
  Description of Artificial Sequence: Synthetic peptide
  Seed: HIHIFSFTGEEMATK
HIHFFSSTAEENATK

SEQ ID NO: 279189 - protein, 15 aa, Artificial Sequence
  Description of Artificial Sequence: Synthetic peptide
  Seed: HIHIFSFTGEEMATK
HIHFFSSTAEEQATK

SEQ ID NO: 279190 - protein, 15 aa, Artificial Sequence
  Description of Artificial Sequence: Synthetic peptide
  Seed: HIHIFSFTGEEMATK
HIHFFSSTAEESATK

SEQ ID NO: 279191 - protein, 15 aa, Artificial Sequence
  Description of Artificial Sequence: Synthetic peptide
  Seed: HIHIFSFTGEEMATK
HIHFFSSTAEETATK

SEQ ID NO: 279192 - protein, 15 aa, Artificial Sequence
  Description of Artificial Sequence: Synthetic peptide
  Seed: HIHIFSFTGEEMATK
HIHFFSSTAEEVATK

SEQ ID NO: 279193 - protein, 15 aa, Artificial Sequence
  Description of Artificial Sequence: Synthetic peptide
  Seed: HIHIFSFTGEEMATK
HIHFFSSTFEEAATK

SEQ ID NO: 279194 - protein, 15 aa, Artificial Sequence
  Description of Artificial Sequence: Synthetic peptide
  Seed: HIHIFSFTGEEMATK
HIHFFSSTFEECATK

SEQ ID NO: 279195 - protein, 15 aa, Artificial Sequence
  Description of Artificial Sequence: Synthetic peptide
  Seed: HIHIFSFTGEEMATK
HIHFFSSTFEEDATK

SEQ ID NO: 279196 - protein, 15 aa, Artificial Sequence
  Description of Artificial Sequence: Synthetic peptide
  Seed: HIHIFSFTGEEMATK
HIHFFSSTFEEEATK

SEQ ID NO: 279197 - protein, 15 aa, Artificial Sequence
  Description of Artificial Sequence: Synthetic peptide
  Seed: HIHIFSFTGEEMATK
HIHFFSSTFEEGATK

SEQ ID NO: 279198 - protein, 15 aa, Artificial Sequence
  Description of Artificial Sequence: Synthetic peptide
  Seed: HIHIFSFTGEEMATK
HIHFFSSTFEEHATK

SEQ ID NO: 279199 - protein, 15 aa, Artificial Sequence
  Description of Artificial Sequence: Synthetic peptide
  Seed: HIHIFSFTGEEMATK
HIHFFSSTFEEIATK

SEQ ID NO: 279200 - protein, 15 aa, Artificial Sequence
  Description of Artificial Sequence: Synthetic peptide
  Seed: HIHIFSFTGEEMATK
HIHFFSSTFEEKATK

SEQ ID NO: 279201 - protein, 15 aa, Artificial Sequence
  Description of Artificial Sequence: Synthetic peptide
  Seed: HIHIFSFTGEEMATK
HIHFFSSTFEEMATK

SEQ ID NO: 279202 - protein, 15 aa, Artificial Sequence
  Description of Artificial Sequence: Synthetic peptide
  Seed: HIHIFSFTGEEMATK
HIHFFSSTFEENATK

SEQ ID NO: 279203 - protein, 15 aa, Artificial Sequence
  Description of Artificial Sequence: Synthetic peptide
  Seed: HIHIFSFTGEEMATK
HIHFFSSTFEEPATK

SEQ ID NO: 279204 - protein, 15 aa, Artificial Sequence
  Description of Artificial Sequence: Synthetic peptide
  Seed: HIHIFSFTGEEMATK
HIHFFSSTFEEQATK

SEQ ID NO: 279205 - protein, 15 aa, Artificial Sequence
  Description of Artificial Sequence: Synthetic peptide
  Seed: HIHIFSFTGEEMATK
HIHFFSSTFEERATK

SEQ ID NO: 279206 - protein, 15 aa, Artificial Sequence
  Description of Artificial Sequence: Synthetic peptide
  Seed: HIHIFSFTGEEMATK
HIHFFSSTFEESATK

SEQ ID NO: 279207 - protein, 15 aa, Artificial Sequence
  Description of Artificial Sequence: Synthetic peptide
  Seed: HIHIFSFTGEEMATK
HIHFFSSTFEETATK

SEQ ID NO: 279208 - protein, 15 aa, Artificial Sequence
  Description of Artificial Sequence: Synthetic peptide
  Seed: HIHIFSFTGEEMATK
HIHFFSSTFEEVATK

SEQ ID NO: 279209 - protein, 15 aa, Artificial Sequence
  Description of Artificial Sequence: Synthetic peptide
  Seed: HIHIFSFTGEEMATK
HIHFFSSTFEEWATK

SEQ ID NO: 279210 - protein, 15 aa, Artificial Sequence
  Description of Artificial Sequence: Synthetic peptide
  Seed: HIHIFSFTGEEMATK
HIHFFSSTFEEYATK

SEQ ID NO: 279211 - protein, 15 aa, Artificial Sequence
  Description of Artificial Sequence: Synthetic peptide
  Seed: HIHIFSFTGEEMATK
HIHFFSSTGEEAATK

SEQ ID NO: 279212 - protein, 15 aa, Artificial Sequence
  Description of Artificial Sequence: Synthetic peptide
  Seed: HIHIFSFTGEEMATK
HIHFFSSTGEEIATK

SEQ ID NO: 279213 - protein, 15 aa, Artificial Sequence
  Description of Artificial Sequence: Synthetic peptide
  Seed: HIHIFSFTGEEMATK
HIHFFSSTGEELATK

SEQ ID NO: 279214 - protein, 15 aa, Artificial Sequence
  Description of Artificial Sequence: Synthetic peptide
  Seed: HIHIFSFTGEEMATK
HIHFFSSTGEEVATK

SEQ ID NO: 279215 - protein, 15 aa, Artificial Sequence
  Description of Artificial Sequence: Synthetic peptide
  Seed: HIHIFSFTGEEMATK
HIHFFSSTIEEAATK

SEQ ID NO: 279216 - protein, 15 aa, Artificial Sequence
  Description of Artificial Sequence: Synthetic peptide
  Seed: HIHIFSFTGEEMATK
HIHFFSSTIEEFATK

SEQ ID NO: 279217 - protein, 15 aa, Artificial Sequence
  Description of Artificial Sequence: Synthetic peptide
  Seed: HIHIFSFTGEEMATK
HIHFFSSTIEEIATK

SEQ ID NO: 279218 - protein, 15 aa, Artificial Sequence
  Description of Artificial Sequence: Synthetic peptide
  Seed: HIHIFSFTGEEMATK
HIHFFSSTIEELATK

SEQ ID NO: 279219 - protein, 15 aa, Artificial Sequence
  Description of Artificial Sequence: Synthetic peptide
  Seed: HIHIFSFTGEEMATK
HIHFFSSTIEEMATK

SEQ ID NO: 279220 - protein, 15 aa, Artificial Sequence
  Description of Artificial Sequence: Synthetic peptide
  Seed: HIHIFSFTGEEMATK
HIHFFSSTIEENATK

SEQ ID NO: 279221 - protein, 15 aa, Artificial Sequence
  Description of Artificial Sequence: Synthetic peptide
  Seed: HIHIFSFTGEEMATK
HIHFFSSTIEESATK

SEQ ID NO: 279222 - protein, 15 aa, Artificial Sequence
  Description of Artificial Sequence: Synthetic peptide
  Seed: HIHIFSFTGEEMATK
HIHFFSSTIEEVATK

SEQ ID NO: 279223 - protein, 15 aa, Artificial Sequence
  Description of Artificial Sequence: Synthetic peptide
  Seed: HIHIFSFTGEEMATK
HIHFFSSTIEEYATK

SEQ ID NO: 279224 - protein, 15 aa, Artificial Sequence
  Description of Artificial Sequence: Synthetic peptide
  Seed: HIHIFSFTGEEMATK
HIHFFSSTLEEAATK

SEQ ID NO: 279225 - protein, 15 aa, Artificial Sequence
  Description of Artificial Sequence: Synthetic peptide
  Seed: HIHIFSFTGEEMATK
HIHFFSSTLEEDATK

SEQ ID NO: 279226 - protein, 15 aa, Artificial Sequence
  Description of Artificial Sequence: Synthetic peptide
  Seed: HIHIFSFTGEEMATK
HIHFFSSTLEEEATK

SEQ ID NO: 279227 - protein, 15 aa, Artificial Sequence
  Description of Artificial Sequence: Synthetic peptide
  Seed: HIHIFSFTGEEMATK
HIHFFSSTLEEFATK

SEQ ID NO: 279228 - protein, 15 aa, Artificial Sequence
  Description of Artificial Sequence: Synthetic peptide
  Seed: HIHIFSFTGEEMATK
HIHFFSSTLEEIATK

SEQ ID NO: 279229 - protein, 15 aa, Artificial Sequence
  Description of Artificial Sequence: Synthetic peptide
  Seed: HIHIFSFTGEEMATK
HIHFFSSTLEELATK

SEQ ID NO: 279230 - protein, 15 aa, Artificial Sequence
  Description of Artificial Sequence: Synthetic peptide
  Seed: HIHIFSFTGEEMATK
HIHFFSSTLEEMATK

SEQ ID NO: 279231 - protein, 15 aa, Artificial Sequence
  Description of Artificial Sequence: Synthetic peptide
  Seed: HIHIFSFTGEEMATK
HIHFFSSTLEESATK

SEQ ID NO: 279232 - protein, 15 aa, Artificial Sequence
  Description of Artificial Sequence: Synthetic peptide
  Seed: HIHIFSFTGEEMATK
HIHFFSSTLEETATK

SEQ ID NO: 279233 - protein, 15 aa, Artificial Sequence
  Description of Artificial Sequence: Synthetic peptide
  Seed: HIHIFSFTGEEMATK
HIHFFSSTLEEVATK

SEQ ID NO: 279234 - protein, 15 aa, Artificial Sequence
  Description of Artificial Sequence: Synthetic peptide
  Seed: HIHIFSFTGEEMATK
HIHFFSSTLEEWATK

SEQ ID NO: 279235 - protein, 15 aa, Artificial Sequence
  Description of Artificial Sequence: Synthetic peptide
  Seed: HIHIFSFTGEEMATK
HIHFFSSTLEEYATK

SEQ ID NO: 279236 - protein, 15 aa, Artificial Sequence
  Description of Artificial Sequence: Synthetic peptide
  Seed: HIHIFSFTGEEMATK
HIHFFSSTMEEFATK

SEQ ID NO: 279237 - protein, 15 aa, Artificial Sequence
  Description of Artificial Sequence: Synthetic peptide
  Seed: HIHIFSFTGEEMATK
HIHFFSSTMEEIATK

SEQ ID NO: 279238 - protein, 15 aa, Artificial Sequence
  Description of Artificial Sequence: Synthetic peptide
  Seed: HIHIFSFTGEEMATK
HIHFFSSTMEELATK

SEQ ID NO: 279239 - protein, 15 aa, Artificial Sequence
  Description of Artificial Sequence: Synthetic peptide
  Seed: HIHIFSFTGEEMATK
HIHFFSSTMEEMATK

SEQ ID NO: 279240 - protein, 15 aa, Artificial Sequence
  Description of Artificial Sequence: Synthetic peptide
  Seed: HIHIFSFTGEEMATK
HIHFFSSTMEEVATK

SEQ ID NO: 279241 - protein, 15 aa, Artificial Sequence
  Description of Artificial Sequence: Synthetic peptide
  Seed: HIHIFSFTGEEMATK
HIHFFSSTMEEYATK

SEQ ID NO: 279242 - protein, 15 aa, Artificial Sequence
  Description of Artificial Sequence: Synthetic peptide
  Seed: HIHIFSFTGEEMATK
HIHFFSSTPEEAATK

SEQ ID NO: 279243 - protein, 15 aa, Artificial Sequence
  Description of Artificial Sequence: Synthetic peptide
  Seed: HIHIFSFTGEEMATK
HIHFFSSTPEEIATK

SEQ ID NO: 279244 - protein, 15 aa, Artificial Sequence
  Description of Artificial Sequence: Synthetic peptide
  Seed: HIHIFSFTGEEMATK
HIHFFSSTPEELATK

SEQ ID NO: 279245 - protein, 15 aa, Artificial Sequence
  Description of Artificial Sequence: Synthetic peptide
  Seed: HIHIFSFTGEEMATK
HIHFFSSTPEESATK

SEQ ID NO: 279246 - protein, 15 aa, Artificial Sequence
  Description of Artificial Sequence: Synthetic peptide
  Seed: HIHIFSFTGEEMATK
HIHFFSSTPEEVATK

SEQ ID NO: 279247 - protein, 15 aa, Artificial Sequence
  Description of Artificial Sequence: Synthetic peptide
  Seed: HIHIFSFTGEEMATK
HIHFFSSTSEEAATK

SEQ ID NO: 279248 - protein, 15 aa, Artificial Sequence
  Description of Artificial Sequence: Synthetic peptide
  Seed: HIHIFSFTGEEMATK
HIHFFSSTSEEIATK

SEQ ID NO: 279249 - protein, 15 aa, Artificial Sequence
  Description of Artificial Sequence: Synthetic peptide
  Seed: HIHIFSFTGEEMATK
HIHFFSSTSEELATK

SEQ ID NO: 279250 - protein, 15 aa, Artificial Sequence
  Description of Artificial Sequence: Synthetic peptide
  Seed: HIHIFSFTGEEMATK
HIHFFSSTSEESATK

SEQ ID NO: 279251 - protein, 15 aa, Artificial Sequence
  Description of Artificial Sequence: Synthetic peptide
  Seed: HIHIFSFTGEEMATK
HIHFFSSTSEEVATK

SEQ ID NO: 279252 - protein, 15 aa, Artificial Sequence
  Description of Artificial Sequence: Synthetic peptide
  Seed: HIHIFSFTGEEMATK
HIHFFSSTTEEAATK

SEQ ID NO: 279253 - protein, 15 aa, Artificial Sequence
  Description of Artificial Sequence: Synthetic peptide
  Seed: HIHIFSFTGEEMATK
HIHFFSSTTEESATK

SEQ ID NO: 279254 - protein, 15 aa, Artificial Sequence
  Description of Artificial Sequence: Synthetic peptide
  Seed: HIHIFSFTGEEMATK
HIHFFSSTVEEAATK

SEQ ID NO: 279255 - protein, 15 aa, Artificial Sequence
  Description of Artificial Sequence: Synthetic peptide
  Seed: HIHIFSFTGEEMATK
HIHFFSSTVEEFATK

SEQ ID NO: 279256 - protein, 15 aa, Artificial Sequence
  Description of Artificial Sequence: Synthetic peptide
  Seed: HIHIFSFTGEEMATK
HIHFFSSTVEEIATK

SEQ ID NO: 279257 - protein, 15 aa, Artificial Sequence
  Description of Artificial Sequence: Synthetic peptide
  Seed: HIHIFSFTGEEMATK
HIHFFSSTVEELATK

SEQ ID NO: 279258 - protein, 15 aa, Artificial Sequence
  Description of Artificial Sequence: Synthetic peptide
  Seed: HIHIFSFTGEEMATK
HIHFFSSTVEEMATK

SEQ ID NO: 279259 - protein, 15 aa, Artificial Sequence
  Description of Artificial Sequence: Synthetic peptide
  Seed: HIHIFSFTGEEMATK
HIHFFSSTVEENATK

SEQ ID NO: 279260 - protein, 15 aa, Artificial Sequence
  Description of Artificial Sequence: Synthetic peptide
  Seed: HIHIFSFTGEEMATK
HIHFFSSTVEESATK

SEQ ID NO: 279261 - protein, 15 aa, Artificial Sequence
  Description of Artificial Sequence: Synthetic peptide
  Seed: HIHIFSFTGEEMATK
HIHFFSSTVEETATK

SEQ ID NO: 279262 - protein, 15 aa, Artificial Sequence
  Description of Artificial Sequence: Synthetic peptide
  Seed: HIHIFSFTGEEMATK
HIHFFSSTVEEVATK

SEQ ID NO: 279263 - protein, 15 aa, Artificial Sequence
  Description of Artificial Sequence: Synthetic peptide
  Seed: HIHIFSFTGEEMATK
HIHFFSSTWEEAATK

SEQ ID NO: 279264 - protein, 15 aa, Artificial Sequence
  Description of Artificial Sequence: Synthetic peptide
  Seed: HIHIFSFTGEEMATK
HIHFFSSTWEEEATK

SEQ ID NO: 279265 - protein, 15 aa, Artificial Sequence
  Description of Artificial Sequence: Synthetic peptide
  Seed: HIHIFSFTGEEMATK
HIHFFSSTWEEFATK

SEQ ID NO: 279266 - protein, 15 aa, Artificial Sequence
  Description of Artificial Sequence: Synthetic peptide
  Seed: HIHIFSFTGEEMATK
HIHFFSSTWEEIATK

SEQ ID NO: 279267 - protein, 15 aa, Artificial Sequence
  Description of Artificial Sequence: Synthetic peptide
  Seed: HIHIFSFTGEEMATK
HIHFFSSTWEELATK

SEQ ID NO: 279268 - protein, 15 aa, Artificial Sequence
  Description of Artificial Sequence: Synthetic peptide
  Seed: HIHIFSFTGEEMATK
HIHFFSSTWEEMATK

SEQ ID NO: 279269 - protein, 15 aa, Artificial Sequence
  Description of Artificial Sequence: Synthetic peptide
  Seed: HIHIFSFTGEEMATK
HIHFFSSTWEESATK

SEQ ID NO: 279270 - protein, 15 aa, Artificial Sequence
  Description of Artificial Sequence: Synthetic peptide
  Seed: HIHIFSFTGEEMATK
HIHFFSSTWEETATK

SEQ ID NO: 279271 - protein, 15 aa, Artificial Sequence
  Description of Artificial Sequence: Synthetic peptide
  Seed: HIHIFSFTGEEMATK
HIHFFSSTWEEVATK

SEQ ID NO: 279272 - protein, 15 aa, Artificial Sequence
  Description of Artificial Sequence: Synthetic peptide
  Seed: HIHIFSFTGEEMATK
HIHFFSSTWEEWATK

SEQ ID NO: 279273 - protein, 15 aa, Artificial Sequence
  Description of Artificial Sequence: Synthetic peptide
  Seed: HIHIFSFTGEEMATK
HIHFFSSTWEEYATK

SEQ ID NO: 279274 - protein, 15 aa, Artificial Sequence
  Description of Artificial Sequence: Synthetic peptide
  Seed: HIHIFSFTGEEMATK
HIHFFSSTYEEAATK

SEQ ID NO: 279275 - protein, 15 aa, Artificial Sequence
  Description of Artificial Sequence: Synthetic peptide
  Seed: HIHIFSFTGEEMATK
HIHFFSSTYEEDATK

SEQ ID NO: 279276 - protein, 15 aa, Artificial Sequence
  Description of Artificial Sequence: Synthetic peptide
  Seed: HIHIFSFTGEEMATK
HIHFFSSTYEEEATK

SEQ ID NO: 279277 - protein, 15 aa, Artificial Sequence
  Description of Artificial Sequence: Synthetic peptide
  Seed: HIHIFSFTGEEMATK
HIHFFSSTYEEFATK

SEQ ID NO: 279278 - protein, 15 aa, Artificial Sequence
  Description of Artificial Sequence: Synthetic peptide
  Seed: HIHIFSFTGEEMATK
HIHFFSSTYEEIATK

SEQ ID NO: 279279 - protein, 15 aa, Artificial Sequence
  Description of Artificial Sequence: Synthetic peptide
  Seed: HIHIFSFTGEEMATK
HIHFFSSTYEELATK

SEQ ID NO: 279280 - protein, 15 aa, Artificial Sequence
  Description of Artificial Sequence: Synthetic peptide
  Seed: HIHIFSFTGEEMATK
HIHFFSSTYEEMATK

SEQ ID NO: 279281 - protein, 15 aa, Artificial Sequence
  Description of Artificial Sequence: Synthetic peptide
  Seed: HIHIFSFTGEEMATK
HIHFFSSTYEENATK

SEQ ID NO: 279282 - protein, 15 aa, Artificial Sequence
  Description of Artificial Sequence: Synthetic peptide
  Seed: HIHIFSFTGEEMATK
HIHFFSSTYEESATK

SEQ ID NO: 279283 - protein, 15 aa, Artificial Sequence
  Description of Artificial Sequence: Synthetic peptide
  Seed: HIHIFSFTGEEMATK
HIHFFSSTYEETATK

SEQ ID NO: 279284 - protein, 15 aa, Artificial Sequence
  Description of Artificial Sequence: Synthetic peptide
  Seed: HIHIFSFTGEEMATK
HIHFFSSTYEEVATK

SEQ ID NO: 279285 - protein, 15 aa, Artificial Sequence
  Description of Artificial Sequence: Synthetic peptide
  Seed: HIHIFSFTGEEMATK
HIHFFSSTYEEWATK

SEQ ID NO: 279286 - protein, 15 aa, Artificial Sequence
  Description of Artificial Sequence: Synthetic peptide
  Seed: HIHIFSFTGEEMATK
HIHFFSSTYEEYATK

SEQ ID NO: 279287 - protein, 15 aa, Artificial Sequence
  Description of Artificial Sequence: Synthetic peptide
  Seed: HIHIFSFTGEEMATK
HIHFFSTTAEEAATK

SEQ ID NO: 279288 - protein, 15 aa, Artificial Sequence
  Description of Artificial Sequence: Synthetic peptide
  Seed: HIHIFSFTGEEMATK
HIHFFSTTAEEFATK

SEQ ID NO: 279289 - protein, 15 aa, Artificial Sequence
  Description of Artificial Sequence: Synthetic peptide
  Seed: HIHIFSFTGEEMATK
HIHFFSTTAEEIATK

SEQ ID NO: 279290 - protein, 15 aa, Artificial Sequence
  Description of Artificial Sequence: Synthetic peptide
  Seed: HIHIFSFTGEEMATK
HIHFFSTTAEELATK

SEQ ID NO: 279291 - protein, 15 aa, Artificial Sequence
  Description of Artificial Sequence: Synthetic peptide
  Seed: HIHIFSFTGEEMATK
HIHFFSTTAEEMATK

SEQ ID NO: 279292 - protein, 15 aa, Artificial Sequence
  Description of Artificial Sequence: Synthetic peptide
  Seed: HIHIFSFTGEEMATK
HIHFFSTTAEENATK

SEQ ID NO: 279293 - protein, 15 aa, Artificial Sequence
  Description of Artificial Sequence: Synthetic peptide
  Seed: HIHIFSFTGEEMATK
HIHFFSTTAEESATK

SEQ ID NO: 279294 - protein, 15 aa, Artificial Sequence
  Description of Artificial Sequence: Synthetic peptide
  Seed: HIHIFSFTGEEMATK
HIHFFSTTAEETATK

SEQ ID NO: 279295 - protein, 15 aa, Artificial Sequence
  Description of Artificial Sequence: Synthetic peptide
  Seed: HIHIFSFTGEEMATK
HIHFFSTTAEEVATK

SEQ ID NO: 279296 - protein, 15 aa, Artificial Sequence
  Description of Artificial Sequence: Synthetic peptide
  Seed: HIHIFSFTGEEMATK
HIHFFSTTFEEAATK

SEQ ID NO: 279297 - protein, 15 aa, Artificial Sequence
  Description of Artificial Sequence: Synthetic peptide
  Seed: HIHIFSFTGEEMATK
HIHFFSTTFEECATK

SEQ ID NO: 279298 - protein, 15 aa, Artificial Sequence
  Description of Artificial Sequence: Synthetic peptide
  Seed: HIHIFSFTGEEMATK
HIHFFSTTFEEDATK

SEQ ID NO: 279299 - protein, 15 aa, Artificial Sequence
  Description of Artificial Sequence: Synthetic peptide
  Seed: HIHIFSFTGEEMATK
HIHFFSTTFEEEATK

SEQ ID NO: 279300 - protein, 15 aa, Artificial Sequence
  Description of Artificial Sequence: Synthetic peptide
  Seed: HIHIFSFTGEEMATK
HIHFFSTTFEEFATK

SEQ ID NO: 279301 - protein, 15 aa, Artificial Sequence
  Description of Artificial Sequence: Synthetic peptide
  Seed: HIHIFSFTGEEMATK
HIHFFSTTFEEGATK

SEQ ID NO: 279302 - protein, 15 aa, Artificial Sequence
  Description of Artificial Sequence: Synthetic peptide
  Seed: HIHIFSFTGEEMATK
HIHFFSTTFEEHATK

SEQ ID NO: 279303 - protein, 15 aa, Artificial Sequence
  Description of Artificial Sequence: Synthetic peptide
  Seed: HIHIFSFTGEEMATK
HIHFFSTTFEEIATK

SEQ ID NO: 279304 - protein, 15 aa, Artificial Sequence
  Description of Artificial Sequence: Synthetic peptide
  Seed: HIHIFSFTGEEMATK
HIHFFSTTFEEKATK

SEQ ID NO: 279305 - protein, 15 aa, Artificial Sequence
  Description of Artificial Sequence: Synthetic peptide
  Seed: HIHIFSFTGEEMATK
HIHFFSTTFEELATK

SEQ ID NO: 279306 - protein, 15 aa, Artificial Sequence
  Description of Artificial Sequence: Synthetic peptide
  Seed: HIHIFSFTGEEMATK
HIHFFSTTFEENATK

SEQ ID NO: 279307 - protein, 15 aa, Artificial Sequence
  Description of Artificial Sequence: Synthetic peptide
  Seed: HIHIFSFTGEEMATK
HIHFFSTTFEEPATK

SEQ ID NO: 279308 - protein, 15 aa, Artificial Sequence
  Description of Artificial Sequence: Synthetic peptide
  Seed: HIHIFSFTGEEMATK
HIHFFSTTFEEQATK

SEQ ID NO: 279309 - protein, 15 aa, Artificial Sequence
  Description of Artificial Sequence: Synthetic peptide
  Seed: HIHIFSFTGEEMATK
HIHFFSTTFEERATK

SEQ ID NO: 279310 - protein, 15 aa, Artificial Sequence
  Description of Artificial Sequence: Synthetic peptide
  Seed: HIHIFSFTGEEMATK
HIHFFSTTFEESATK

SEQ ID NO: 279311 - protein, 15 aa, Artificial Sequence
  Description of Artificial Sequence: Synthetic peptide
  Seed: HIHIFSFTGEEMATK
HIHFFSTTFEETATK

SEQ ID NO: 279312 - protein, 15 aa, Artificial Sequence
  Description of Artificial Sequence: Synthetic peptide
  Seed: HIHIFSFTGEEMATK
HIHFFSTTFEEVATK

SEQ ID NO: 279313 - protein, 15 aa, Artificial Sequence
  Description of Artificial Sequence: Synthetic peptide
  Seed: HIHIFSFTGEEMATK
HIHFFSTTFEEWATK

SEQ ID NO: 279314 - protein, 15 aa, Artificial Sequence
  Description of Artificial Sequence: Synthetic peptide
  Seed: HIHIFSFTGEEMATK
HIHFFSTTFEEYATK

SEQ ID NO: 279315 - protein, 15 aa, Artificial Sequence
  Description of Artificial Sequence: Synthetic peptide
  Seed: HIHIFSFTGEEMATK
HIHFFSTTGEEAATK

SEQ ID NO: 279316 - protein, 15 aa, Artificial Sequence
  Description of Artificial Sequence: Synthetic peptide
  Seed: HIHIFSFTGEEMATK
HIHFFSTTGEEIATK

SEQ ID NO: 279317 - protein, 15 aa, Artificial Sequence
  Description of Artificial Sequence: Synthetic peptide
  Seed: HIHIFSFTGEEMATK
HIHFFSTTGEELATK

SEQ ID NO: 279318 - protein, 15 aa, Artificial Sequence
  Description of Artificial Sequence: Synthetic peptide
  Seed: HIHIFSFTGEEMATK
HIHFFSTTGEEVATK

SEQ ID NO: 279319 - protein, 15 aa, Artificial Sequence
  Description of Artificial Sequence: Synthetic peptide
  Seed: HIHIFSFTGEEMATK
HIHFFSTTIEEAATK

SEQ ID NO: 279320 - protein, 15 aa, Artificial Sequence
  Description of Artificial Sequence: Synthetic peptide
  Seed: HIHIFSFTGEEMATK
HIHFFSTTIEEEATK

SEQ ID NO: 279321 - protein, 15 aa, Artificial Sequence
  Description of Artificial Sequence: Synthetic peptide
  Seed: HIHIFSFTGEEMATK
HIHFFSTTIEEFATK

SEQ ID NO: 279322 - protein, 15 aa, Artificial Sequence
  Description of Artificial Sequence: Synthetic peptide
  Seed: HIHIFSFTGEEMATK
HIHFFSTTIEEIATK

SEQ ID NO: 279323 - protein, 15 aa, Artificial Sequence
  Description of Artificial Sequence: Synthetic peptide
  Seed: HIHIFSFTGEEMATK
HIHFFSTTIEELATK

SEQ ID NO: 279324 - protein, 15 aa, Artificial Sequence
  Description of Artificial Sequence: Synthetic peptide
  Seed: HIHIFSFTGEEMATK
HIHFFSTTIEEMATK

SEQ ID NO: 279325 - protein, 15 aa, Artificial Sequence
  Description of Artificial Sequence: Synthetic peptide
  Seed: HIHIFSFTGEEMATK
HIHFFSTTIEETATK

SEQ ID NO: 279326 - protein, 15 aa, Artificial Sequence
  Description of Artificial Sequence: Synthetic peptide
  Seed: HIHIFSFTGEEMATK
HIHFFSTTIEEVATK

SEQ ID NO: 279327 - protein, 15 aa, Artificial Sequence
  Description of Artificial Sequence: Synthetic peptide
  Seed: HIHIFSFTGEEMATK
HIHFFSTTIEEYATK

SEQ ID NO: 279328 - protein, 15 aa, Artificial Sequence
  Description of Artificial Sequence: Synthetic peptide
  Seed: HIHIFSFTGEEMATK
HIHFFSTTLEEAATK

SEQ ID NO: 279329 - protein, 15 aa, Artificial Sequence
  Description of Artificial Sequence: Synthetic peptide
  Seed: HIHIFSFTGEEMATK
HIHFFSTTLEEDATK

SEQ ID NO: 279330 - protein, 15 aa, Artificial Sequence
  Description of Artificial Sequence: Synthetic peptide
  Seed: HIHIFSFTGEEMATK
HIHFFSTTLEEEATK

SEQ ID NO: 279331 - protein, 15 aa, Artificial Sequence
  Description of Artificial Sequence: Synthetic peptide
  Seed: HIHIFSFTGEEMATK
HIHFFSTTLEEFATK

SEQ ID NO: 279332 - protein, 15 aa, Artificial Sequence
  Description of Artificial Sequence: Synthetic peptide
  Seed: HIHIFSFTGEEMATK
HIHFFSTTLEEIATK

SEQ ID NO: 279333 - protein, 15 aa, Artificial Sequence
  Description of Artificial Sequence: Synthetic peptide
  Seed: HIHIFSFTGEEMATK
HIHFFSTTLEELATK

SEQ ID NO: 279334 - protein, 15 aa, Artificial Sequence
  Description of Artificial Sequence: Synthetic peptide
  Seed: HIHIFSFTGEEMATK
HIHFFSTTLEEMATK

SEQ ID NO: 279335 - protein, 15 aa, Artificial Sequence
  Description of Artificial Sequence: Synthetic peptide
  Seed: HIHIFSFTGEEMATK
HIHFFSTTLEENATK

SEQ ID NO: 279336 - protein, 15 aa, Artificial Sequence
  Description of Artificial Sequence: Synthetic peptide
  Seed: HIHIFSFTGEEMATK
HIHFFSTTLEESATK

SEQ ID NO: 279337 - protein, 15 aa, Artificial Sequence
  Description of Artificial Sequence: Synthetic peptide
  Seed: HIHIFSFTGEEMATK
HIHFFSTTLEETATK

SEQ ID NO: 279338 - protein, 15 aa, Artificial Sequence
  Description of Artificial Sequence: Synthetic peptide
  Seed: HIHIFSFTGEEMATK
HIHFFSTTLEEVATK

SEQ ID NO: 279339 - protein, 15 aa, Artificial Sequence
  Description of Artificial Sequence: Synthetic peptide
  Seed: HIHIFSFTGEEMATK
HIHFFSTTLEEWATK

SEQ ID NO: 279340 - protein, 15 aa, Artificial Sequence
  Description of Artificial Sequence: Synthetic peptide
  Seed: HIHIFSFTGEEMATK
HIHFFSTTLEEYATK

SEQ ID NO: 279341 - protein, 15 aa, Artificial Sequence
  Description of Artificial Sequence: Synthetic peptide
  Seed: HIHIFSFTGEEMATK
HIHFFSTTMEEAATK

SEQ ID NO: 279342 - protein, 15 aa, Artificial Sequence
  Description of Artificial Sequence: Synthetic peptide
  Seed: HIHIFSFTGEEMATK
HIHFFSTTMEEEATK

SEQ ID NO: 279343 - protein, 15 aa, Artificial Sequence
  Description of Artificial Sequence: Synthetic peptide
  Seed: HIHIFSFTGEEMATK
HIHFFSTTMEEFATK

SEQ ID NO: 279344 - protein, 15 aa, Artificial Sequence
  Description of Artificial Sequence: Synthetic peptide
  Seed: HIHIFSFTGEEMATK
HIHFFSTTMEEIATK

SEQ ID NO: 279345 - protein, 15 aa, Artificial Sequence
  Description of Artificial Sequence: Synthetic peptide
  Seed: HIHIFSFTGEEMATK
HIHFFSTTMEELATK

SEQ ID NO: 279346 - protein, 15 aa, Artificial Sequence
  Description of Artificial Sequence: Synthetic peptide
  Seed: HIHIFSFTGEEMATK
HIHFFSTTMEEMATK

SEQ ID NO: 279347 - protein, 15 aa, Artificial Sequence
  Description of Artificial Sequence: Synthetic peptide
  Seed: HIHIFSFTGEEMATK
HIHFFSTTMEETATK

SEQ ID NO: 279348 - protein, 15 aa, Artificial Sequence
  Description of Artificial Sequence: Synthetic peptide
  Seed: HIHIFSFTGEEMATK
HIHFFSTTMEEVATK

SEQ ID NO: 279349 - protein, 15 aa, Artificial Sequence
  Description of Artificial Sequence: Synthetic peptide
  Seed: HIHIFSFTGEEMATK
HIHFFSTTMEEYATK

SEQ ID NO: 279350 - protein, 15 aa, Artificial Sequence
  Description of Artificial Sequence: Synthetic peptide
  Seed: HIHIFSFTGEEMATK
HIHFFSTTPEEAATK

SEQ ID NO: 279351 - protein, 15 aa, Artificial Sequence
  Description of Artificial Sequence: Synthetic peptide
  Seed: HIHIFSFTGEEMATK
HIHFFSTTPEESATK

SEQ ID NO: 279352 - protein, 15 aa, Artificial Sequence
  Description of Artificial Sequence: Synthetic peptide
  Seed: HIHIFSFTGEEMATK
HIHFFSTTSEEAATK

SEQ ID NO: 279353 - protein, 15 aa, Artificial Sequence
  Description of Artificial Sequence: Synthetic peptide
  Seed: HIHIFSFTGEEMATK
HIHFFSTTSEEIATK

SEQ ID NO: 279354 - protein, 15 aa, Artificial Sequence
  Description of Artificial Sequence: Synthetic peptide
  Seed: HIHIFSFTGEEMATK
HIHFFSTTSEELATK

SEQ ID NO: 279355 - protein, 15 aa, Artificial Sequence
  Description of Artificial Sequence: Synthetic peptide
  Seed: HIHIFSFTGEEMATK
HIHFFSTTSEESATK

SEQ ID NO: 279356 - protein, 15 aa, Artificial Sequence
  Description of Artificial Sequence: Synthetic peptide
  Seed: HIHIFSFTGEEMATK
HIHFFSTTSEEVATK

SEQ ID NO: 279357 - protein, 15 aa, Artificial Sequence
  Description of Artificial Sequence: Synthetic peptide
  Seed: HIHIFSFTGEEMATK
HIHFFSTTVEEAATK

SEQ ID NO: 279358 - protein, 15 aa, Artificial Sequence
  Description of Artificial Sequence: Synthetic peptide
  Seed: HIHIFSFTGEEMATK
HIHFFSTTVEEFATK

SEQ ID NO: 279359 - protein, 15 aa, Artificial Sequence
  Description of Artificial Sequence: Synthetic peptide
  Seed: HIHIFSFTGEEMATK
HIHFFSTTVEEIATK

SEQ ID NO: 279360 - protein, 15 aa, Artificial Sequence
  Description of Artificial Sequence: Synthetic peptide
  Seed: HIHIFSFTGEEMATK
HIHFFSTTVEELATK

SEQ ID NO: 279361 - protein, 15 aa, Artificial Sequence
  Description of Artificial Sequence: Synthetic peptide
  Seed: HIHIFSFTGEEMATK
HIHFFSTTVEEMATK

SEQ ID NO: 279362 - protein, 15 aa, Artificial Sequence
  Description of Artificial Sequence: Synthetic peptide
  Seed: HIHIFSFTGEEMATK
HIHFFSTTVEESATK

SEQ ID NO: 279363 - protein, 15 aa, Artificial Sequence
  Description of Artificial Sequence: Synthetic peptide
  Seed: HIHIFSFTGEEMATK
HIHFFSTTVEEVATK

SEQ ID NO: 279364 - protein, 15 aa, Artificial Sequence
  Description of Artificial Sequence: Synthetic peptide
  Seed: HIHIFSFTGEEMATK
HIHFFSTTVEEYATK

SEQ ID NO: 279365 - protein, 15 aa, Artificial Sequence
  Description of Artificial Sequence: Synthetic peptide
  Seed: HIHIFSFTGEEMATK
HIHFFSTTWEEAATK

SEQ ID NO: 279366 - protein, 15 aa, Artificial Sequence
  Description of Artificial Sequence: Synthetic peptide
  Seed: HIHIFSFTGEEMATK
HIHFFSTTWEEDATK

SEQ ID NO: 279367 - protein, 15 aa, Artificial Sequence
  Description of Artificial Sequence: Synthetic peptide
  Seed: HIHIFSFTGEEMATK
HIHFFSTTWEEEATK

SEQ ID NO: 279368 - protein, 15 aa, Artificial Sequence
  Description of Artificial Sequence: Synthetic peptide
  Seed: HIHIFSFTGEEMATK
HIHFFSTTWEEFATK

SEQ ID NO: 279369 - protein, 15 aa, Artificial Sequence
  Description of Artificial Sequence: Synthetic peptide
  Seed: HIHIFSFTGEEMATK
HIHFFSTTWEEIATK

SEQ ID NO: 279370 - protein, 15 aa, Artificial Sequence
  Description of Artificial Sequence: Synthetic peptide
  Seed: HIHIFSFTGEEMATK
HIHFFSTTWEELATK

SEQ ID NO: 279371 - protein, 15 aa, Artificial Sequence
  Description of Artificial Sequence: Synthetic peptide
  Seed: HIHIFSFTGEEMATK
HIHFFSTTWEEMATK

SEQ ID NO: 279372 - protein, 15 aa, Artificial Sequence
  Description of Artificial Sequence: Synthetic peptide
  Seed: HIHIFSFTGEEMATK
HIHFFSTTWEENATK

SEQ ID NO: 279373 - protein, 15 aa, Artificial Sequence
  Description of Artificial Sequence: Synthetic peptide
  Seed: HIHIFSFTGEEMATK
HIHFFSTTWEESATK

SEQ ID NO: 279374 - protein, 15 aa, Artificial Sequence
  Description of Artificial Sequence: Synthetic peptide
  Seed: HIHIFSFTGEEMATK
HIHFFSTTWEETATK

SEQ ID NO: 279375 - protein, 15 aa, Artificial Sequence
  Description of Artificial Sequence: Synthetic peptide
  Seed: HIHIFSFTGEEMATK
HIHFFSTTWEEVATK

SEQ ID NO: 279376 - protein, 15 aa, Artificial Sequence
  Description of Artificial Sequence: Synthetic peptide
  Seed: HIHIFSFTGEEMATK
HIHFFSTTWEEWATK

SEQ ID NO: 279377 - protein, 15 aa, Artificial Sequence
  Description of Artificial Sequence: Synthetic peptide
  Seed: HIHIFSFTGEEMATK
HIHFFSTTWEEYATK

SEQ ID NO: 279378 - protein, 15 aa, Artificial Sequence
  Description of Artificial Sequence: Synthetic peptide
  Seed: HIHIFSFTGEEMATK
HIHFFSTTYEEAATK

SEQ ID NO: 279379 - protein, 15 aa, Artificial Sequence
  Description of Artificial Sequence: Synthetic peptide
  Seed: HIHIFSFTGEEMATK
HIHFFSTTYEEDATK

SEQ ID NO: 279380 - protein, 15 aa, Artificial Sequence
  Description of Artificial Sequence: Synthetic peptide
  Seed: HIHIFSFTGEEMATK
HIHFFSTTYEEEATK

SEQ ID NO: 279381 - protein, 15 aa, Artificial Sequence
  Description of Artificial Sequence: Synthetic peptide
  Seed: HIHIFSFTGEEMATK
HIHFFSTTYEEFATK

SEQ ID NO: 279382 - protein, 15 aa, Artificial Sequence
  Description of Artificial Sequence: Synthetic peptide
  Seed: HIHIFSFTGEEMATK
HIHFFSTTYEEIATK

SEQ ID NO: 279383 - protein, 15 aa, Artificial Sequence
  Description of Artificial Sequence: Synthetic peptide
  Seed: HIHIFSFTGEEMATK
HIHFFSTTYEELATK

SEQ ID NO: 279384 - protein, 15 aa, Artificial Sequence
  Description of Artificial Sequence: Synthetic peptide
  Seed: HIHIFSFTGEEMATK
HIHFFSTTYEEMATK

SEQ ID NO: 279385 - protein, 15 aa, Artificial Sequence
  Description of Artificial Sequence: Synthetic peptide
  Seed: HIHIFSFTGEEMATK
HIHFFSTTYEENATK

SEQ ID NO: 279386 - protein, 15 aa, Artificial Sequence
  Description of Artificial Sequence: Synthetic peptide
  Seed: HIHIFSFTGEEMATK
HIHFFSTTYEEQATK

SEQ ID NO: 279387 - protein, 15 aa, Artificial Sequence
  Description of Artificial Sequence: Synthetic peptide
  Seed: HIHIFSFTGEEMATK
HIHFFSTTYEESATK

SEQ ID NO: 279388 - protein, 15 aa, Artificial Sequence
  Description of Artificial Sequence: Synthetic peptide
  Seed: HIHIFSFTGEEMATK
HIHFFSTTYEETATK

SEQ ID NO: 279389 - protein, 15 aa, Artificial Sequence
  Description of Artificial Sequence: Synthetic peptide
  Seed: HIHIFSFTGEEMATK
HIHFFSTTYEEVATK

SEQ ID NO: 279390 - protein, 15 aa, Artificial Sequence
  Description of Artificial Sequence: Synthetic peptide
  Seed: HIHIFSFTGEEMATK
HIHFFSTTYEEWATK

SEQ ID NO: 279391 - protein, 15 aa, Artificial Sequence
  Description of Artificial Sequence: Synthetic peptide
  Seed: HIHIFSFTGEEMATK
HIHFFSTTYEEYATK

SEQ ID NO: 279392 - protein, 15 aa, Artificial Sequence
  Description of Artificial Sequence: Synthetic peptide
  Seed: HIHIFSFTGEEMATK
HIHFFSVTAEEAATK

SEQ ID NO: 279393 - protein, 15 aa, Artificial Sequence
  Description of Artificial Sequence: Synthetic peptide
  Seed: HIHIFSFTGEEMATK
HIHFFSVTAEEFATK

SEQ ID NO: 279394 - protein, 15 aa, Artificial Sequence
  Description of Artificial Sequence: Synthetic peptide
  Seed: HIHIFSFTGEEMATK
HIHFFSVTAEEGATK

SEQ ID NO: 279395 - protein, 15 aa, Artificial Sequence
  Description of Artificial Sequence: Synthetic peptide
  Seed: HIHIFSFTGEEMATK
HIHFFSVTAEEHATK

SEQ ID NO: 279396 - protein, 15 aa, Artificial Sequence
  Description of Artificial Sequence: Synthetic peptide
  Seed: HIHIFSFTGEEMATK
HIHFFSVTAEEIATK

SEQ ID NO: 279397 - protein, 15 aa, Artificial Sequence
  Description of Artificial Sequence: Synthetic peptide
  Seed: HIHIFSFTGEEMATK
HIHFFSVTAEELATK

SEQ ID NO: 279398 - protein, 15 aa, Artificial Sequence
  Description of Artificial Sequence: Synthetic peptide
  Seed: HIHIFSFTGEEMATK
HIHFFSVTAEEMATK

SEQ ID NO: 279399 - protein, 15 aa, Artificial Sequence
  Description of Artificial Sequence: Synthetic peptide
  Seed: HIHIFSFTGEEMATK
HIHFFSVTAEENATK

SEQ ID NO: 279400 - protein, 15 aa, Artificial Sequence
  Description of Artificial Sequence: Synthetic peptide
  Seed: HIHIFSFTGEEMATK
HIHFFSVTAEEPATK

SEQ ID NO: 279401 - protein, 15 aa, Artificial Sequence
  Description of Artificial Sequence: Synthetic peptide
  Seed: HIHIFSFTGEEMATK
HIHFFSVTAEEQATK

SEQ ID NO: 279402 - protein, 15 aa, Artificial Sequence
  Description of Artificial Sequence: Synthetic peptide
  Seed: HIHIFSFTGEEMATK
HIHFFSVTAEESATK

SEQ ID NO: 279403 - protein, 15 aa, Artificial Sequence
  Description of Artificial Sequence: Synthetic peptide
  Seed: HIHIFSFTGEEMATK
HIHFFSVTAEETATK

SEQ ID NO: 279404 - protein, 15 aa, Artificial Sequence
  Description of Artificial Sequence: Synthetic peptide
  Seed: HIHIFSFTGEEMATK
HIHFFSVTAEEVATK

SEQ ID NO: 279405 - protein, 15 aa, Artificial Sequence
  Description of Artificial Sequence: Synthetic peptide
  Seed: HIHIFSFTGEEMATK
HIHFFSVTFEEAATK

SEQ ID NO: 279406 - protein, 15 aa, Artificial Sequence
  Description of Artificial Sequence: Synthetic peptide
  Seed: HIHIFSFTGEEMATK
HIHFFSVTFEECATK

SEQ ID NO: 279407 - protein, 15 aa, Artificial Sequence
  Description of Artificial Sequence: Synthetic peptide
  Seed: HIHIFSFTGEEMATK
HIHFFSVTFEEDATK

SEQ ID NO: 279408 - protein, 15 aa, Artificial Sequence
  Description of Artificial Sequence: Synthetic peptide
  Seed: HIHIFSFTGEEMATK
HIHFFSVTFEEEATK

SEQ ID NO: 279409 - protein, 15 aa, Artificial Sequence
  Description of Artificial Sequence: Synthetic peptide
  Seed: HIHIFSFTGEEMATK
HIHFFSVTFEEFATK

SEQ ID NO: 279410 - protein, 15 aa, Artificial Sequence
  Description of Artificial Sequence: Synthetic peptide
  Seed: HIHIFSFTGEEMATK
HIHFFSVTFEEGATK

SEQ ID NO: 279411 - protein, 15 aa, Artificial Sequence
  Description of Artificial Sequence: Synthetic peptide
  Seed: HIHIFSFTGEEMATK
HIHFFSVTFEEHATK

SEQ ID NO: 279412 - protein, 15 aa, Artificial Sequence
  Description of Artificial Sequence: Synthetic peptide
  Seed: HIHIFSFTGEEMATK
HIHFFSVTFEEIATK

SEQ ID NO: 279413 - protein, 15 aa, Artificial Sequence
  Description of Artificial Sequence: Synthetic peptide
  Seed: HIHIFSFTGEEMATK
HIHFFSVTFEEKATK

SEQ ID NO: 279414 - protein, 15 aa, Artificial Sequence
  Description of Artificial Sequence: Synthetic peptide
  Seed: HIHIFSFTGEEMATK
HIHFFSVTFEELATK

SEQ ID NO: 279415 - protein, 15 aa, Artificial Sequence
  Description of Artificial Sequence: Synthetic peptide
  Seed: HIHIFSFTGEEMATK
HIHFFSVTFEEMATK

SEQ ID NO: 279416 - protein, 15 aa, Artificial Sequence
  Description of Artificial Sequence: Synthetic peptide
  Seed: HIHIFSFTGEEMATK
HIHFFSVTFEENATK

SEQ ID NO: 279417 - protein, 15 aa, Artificial Sequence
  Description of Artificial Sequence: Synthetic peptide
  Seed: HIHIFSFTGEEMATK
HIHFFSVTFEEPATK

SEQ ID NO: 279418 - protein, 15 aa, Artificial Sequence
  Description of Artificial Sequence: Synthetic peptide
  Seed: HIHIFSFTGEEMATK
HIHFFSVTFEEQATK

SEQ ID NO: 279419 - protein, 15 aa, Artificial Sequence
  Description of Artificial Sequence: Synthetic peptide
  Seed: HIHIFSFTGEEMATK
HIHFFSVTFEERATK

SEQ ID NO: 279420 - protein, 15 aa, Artificial Sequence
  Description of Artificial Sequence: Synthetic peptide
  Seed: HIHIFSFTGEEMATK
HIHFFSVTFEESATK

SEQ ID NO: 279421 - protein, 15 aa, Artificial Sequence
  Description of Artificial Sequence: Synthetic peptide
  Seed: HIHIFSFTGEEMATK
HIHFFSVTFEETATK

SEQ ID NO: 279422 - protein, 15 aa, Artificial Sequence
  Description of Artificial Sequence: Synthetic peptide
  Seed: HIHIFSFTGEEMATK
HIHFFSVTFEEVATK

SEQ ID NO: 279423 - protein, 15 aa, Artificial Sequence
  Description of Artificial Sequence: Synthetic peptide
  Seed: HIHIFSFTGEEMATK
HIHFFSVTFEEWATK

SEQ ID NO: 279424 - protein, 15 aa, Artificial Sequence
  Description of Artificial Sequence: Synthetic peptide
  Seed: HIHIFSFTGEEMATK
HIHFFSVTFEEYATK

SEQ ID NO: 279425 - protein, 15 aa, Artificial Sequence
  Description of Artificial Sequence: Synthetic peptide
  Seed: HIHIFSFTGEEMATK
HIHFFSVTGEEAATK

SEQ ID NO: 279426 - protein, 15 aa, Artificial Sequence
  Description of Artificial Sequence: Synthetic peptide
  Seed: HIHIFSFTGEEMATK
HIHFFSVTGEEGATK

SEQ ID NO: 279427 - protein, 15 aa, Artificial Sequence
  Description of Artificial Sequence: Synthetic peptide
  Seed: HIHIFSFTGEEMATK
HIHFFSVTGEEHATK

SEQ ID NO: 279428 - protein, 15 aa, Artificial Sequence
  Description of Artificial Sequence: Synthetic peptide
  Seed: HIHIFSFTGEEMATK
HIHFFSVTGEEIATK

SEQ ID NO: 279429 - protein, 15 aa, Artificial Sequence
  Description of Artificial Sequence: Synthetic peptide
  Seed: HIHIFSFTGEEMATK
HIHFFSVTGEELATK

SEQ ID NO: 279430 - protein, 15 aa, Artificial Sequence
  Description of Artificial Sequence: Synthetic peptide
  Seed: HIHIFSFTGEEMATK
HIHFFSVTGEEMATK

SEQ ID NO: 279431 - protein, 15 aa, Artificial Sequence
  Description of Artificial Sequence: Synthetic peptide
  Seed: HIHIFSFTGEEMATK
HIHFFSVTGEENATK

SEQ ID NO: 279432 - protein, 15 aa, Artificial Sequence
  Description of Artificial Sequence: Synthetic peptide
  Seed: HIHIFSFTGEEMATK
HIHFFSVTGEESATK

SEQ ID NO: 279433 - protein, 15 aa, Artificial Sequence
  Description of Artificial Sequence: Synthetic peptide
  Seed: HIHIFSFTGEEMATK
HIHFFSVTGEETATK

SEQ ID NO: 279434 - protein, 15 aa, Artificial Sequence
  Description of Artificial Sequence: Synthetic peptide
  Seed: HIHIFSFTGEEMATK
HIHFFSVTGEEVATK

SEQ ID NO: 279435 - protein, 15 aa, Artificial Sequence
  Description of Artificial Sequence: Synthetic peptide
  Seed: HIHIFSFTGEEMATK
HIHFFSVTIEEAATK

SEQ ID NO: 279436 - protein, 15 aa, Artificial Sequence
  Description of Artificial Sequence: Synthetic peptide
  Seed: HIHIFSFTGEEMATK
HIHFFSVTIEEDATK

SEQ ID NO: 279437 - protein, 15 aa, Artificial Sequence
  Description of Artificial Sequence: Synthetic peptide
  Seed: HIHIFSFTGEEMATK
HIHFFSVTIEEEATK

SEQ ID NO: 279438 - protein, 15 aa, Artificial Sequence
  Description of Artificial Sequence: Synthetic peptide
  Seed: HIHIFSFTGEEMATK
HIHFFSVTIEEFATK

SEQ ID NO: 279439 - protein, 15 aa, Artificial Sequence
  Description of Artificial Sequence: Synthetic peptide
  Seed: HIHIFSFTGEEMATK
HIHFFSVTIEEGATK

SEQ ID NO: 279440 - protein, 15 aa, Artificial Sequence
  Description of Artificial Sequence: Synthetic peptide
  Seed: HIHIFSFTGEEMATK
HIHFFSVTIEEHATK

SEQ ID NO: 279441 - protein, 15 aa, Artificial Sequence
  Description of Artificial Sequence: Synthetic peptide
  Seed: HIHIFSFTGEEMATK
HIHFFSVTIEEIATK

SEQ ID NO: 279442 - protein, 15 aa, Artificial Sequence
  Description of Artificial Sequence: Synthetic peptide
  Seed: HIHIFSFTGEEMATK
HIHFFSVTIEELATK

SEQ ID NO: 279443 - protein, 15 aa, Artificial Sequence
  Description of Artificial Sequence: Synthetic peptide
  Seed: HIHIFSFTGEEMATK
HIHFFSVTIEEMATK

SEQ ID NO: 279444 - protein, 15 aa, Artificial Sequence
  Description of Artificial Sequence: Synthetic peptide
  Seed: HIHIFSFTGEEMATK
HIHFFSVTIEENATK

SEQ ID NO: 279445 - protein, 15 aa, Artificial Sequence
  Description of Artificial Sequence: Synthetic peptide
  Seed: HIHIFSFTGEEMATK
HIHFFSVTIEEQATK

SEQ ID NO: 279446 - protein, 15 aa, Artificial Sequence
  Description of Artificial Sequence: Synthetic peptide
  Seed: HIHIFSFTGEEMATK
HIHFFSVTIEESATK

SEQ ID NO: 279447 - protein, 15 aa, Artificial Sequence
  Description of Artificial Sequence: Synthetic peptide
  Seed: HIHIFSFTGEEMATK
HIHFFSVTIEETATK

SEQ ID NO: 279448 - protein, 15 aa, Artificial Sequence
  Description of Artificial Sequence: Synthetic peptide
  Seed: HIHIFSFTGEEMATK
HIHFFSVTIEEVATK

SEQ ID NO: 279449 - protein, 15 aa, Artificial Sequence
  Description of Artificial Sequence: Synthetic peptide
  Seed: HIHIFSFTGEEMATK
HIHFFSVTIEEYATK

SEQ ID NO: 279450 - protein, 15 aa, Artificial Sequence
  Description of Artificial Sequence: Synthetic peptide
  Seed: HIHIFSFTGEEMATK
HIHFFSVTLEEAATK

SEQ ID NO: 279451 - protein, 15 aa, Artificial Sequence
  Description of Artificial Sequence: Synthetic peptide
  Seed: HIHIFSFTGEEMATK
HIHFFSVTLEEDATK

SEQ ID NO: 279452 - protein, 15 aa, Artificial Sequence
  Description of Artificial Sequence: Synthetic peptide
  Seed: HIHIFSFTGEEMATK
HIHFFSVTLEEEATK

SEQ ID NO: 279453 - protein, 15 aa, Artificial Sequence
  Description of Artificial Sequence: Synthetic peptide
  Seed: HIHIFSFTGEEMATK
HIHFFSVTLEEFATK

SEQ ID NO: 279454 - protein, 15 aa, Artificial Sequence
  Description of Artificial Sequence: Synthetic peptide
  Seed: HIHIFSFTGEEMATK
HIHFFSVTLEEIATK

SEQ ID NO: 279455 - protein, 15 aa, Artificial Sequence
  Description of Artificial Sequence: Synthetic peptide
  Seed: HIHIFSFTGEEMATK
HIHFFSVTLEELATK

SEQ ID NO: 279456 - protein, 15 aa, Artificial Sequence
  Description of Artificial Sequence: Synthetic peptide
  Seed: HIHIFSFTGEEMATK
HIHFFSVTLEEMATK

SEQ ID NO: 279457 - protein, 15 aa, Artificial Sequence
  Description of Artificial Sequence: Synthetic peptide
  Seed: HIHIFSFTGEEMATK
HIHFFSVTLEENATK

SEQ ID NO: 279458 - protein, 15 aa, Artificial Sequence
  Description of Artificial Sequence: Synthetic peptide
  Seed: HIHIFSFTGEEMATK
HIHFFSVTLEESATK

SEQ ID NO: 279459 - protein, 15 aa, Artificial Sequence
  Description of Artificial Sequence: Synthetic peptide
  Seed: HIHIFSFTGEEMATK
HIHFFSVTLEETATK

SEQ ID NO: 279460 - protein, 15 aa, Artificial Sequence
  Description of Artificial Sequence: Synthetic peptide
  Seed: HIHIFSFTGEEMATK
HIHFFSVTLEEVATK

SEQ ID NO: 279461 - protein, 15 aa, Artificial Sequence
  Description of Artificial Sequence: Synthetic peptide
  Seed: HIHIFSFTGEEMATK
HIHFFSVTLEEYATK

SEQ ID NO: 279462 - protein, 15 aa, Artificial Sequence
  Description of Artificial Sequence: Synthetic peptide
  Seed: HIHIFSFTGEEMATK
HIHFFSVTMEEAATK

SEQ ID NO: 279463 - protein, 15 aa, Artificial Sequence
  Description of Artificial Sequence: Synthetic peptide
  Seed: HIHIFSFTGEEMATK
HIHFFSVTMEEEATK

SEQ ID NO: 279464 - protein, 15 aa, Artificial Sequence
  Description of Artificial Sequence: Synthetic peptide
  Seed: HIHIFSFTGEEMATK
HIHFFSVTMEEFATK

SEQ ID NO: 279465 - protein, 15 aa, Artificial Sequence
  Description of Artificial Sequence: Synthetic peptide
  Seed: HIHIFSFTGEEMATK
HIHFFSVTMEEIATK

SEQ ID NO: 279466 - protein, 15 aa, Artificial Sequence
  Description of Artificial Sequence: Synthetic peptide
  Seed: HIHIFSFTGEEMATK
HIHFFSVTMEELATK

SEQ ID NO: 279467 - protein, 15 aa, Artificial Sequence
  Description of Artificial Sequence: Synthetic peptide
  Seed: HIHIFSFTGEEMATK
HIHFFSVTMEEMATK

SEQ ID NO: 279468 - protein, 15 aa, Artificial Sequence
  Description of Artificial Sequence: Synthetic peptide
  Seed: HIHIFSFTGEEMATK
HIHFFSVTMEENATK

SEQ ID NO: 279469 - protein, 15 aa, Artificial Sequence
  Description of Artificial Sequence: Synthetic peptide
  Seed: HIHIFSFTGEEMATK
HIHFFSVTMEESATK

SEQ ID NO: 279470 - protein, 15 aa, Artificial Sequence
  Description of Artificial Sequence: Synthetic peptide
  Seed: HIHIFSFTGEEMATK
HIHFFSVTMEETATK

SEQ ID NO: 279471 - protein, 15 aa, Artificial Sequence
  Description of Artificial Sequence: Synthetic peptide
  Seed: HIHIFSFTGEEMATK
HIHFFSVTMEEVATK

SEQ ID NO: 279472 - protein, 15 aa, Artificial Sequence
  Description of Artificial Sequence: Synthetic peptide
  Seed: HIHIFSFTGEEMATK
HIHFFSVTMEEYATK

SEQ ID NO: 279473 - protein, 15 aa, Artificial Sequence
  Description of Artificial Sequence: Synthetic peptide
  Seed: HIHIFSFTGEEMATK
HIHFFSVTNEEAATK

SEQ ID NO: 279474 - protein, 15 aa, Artificial Sequence
  Description of Artificial Sequence: Synthetic peptide
  Seed: HIHIFSFTGEEMATK
HIHFFSVTNEEDATK

SEQ ID NO: 279475 - protein, 15 aa, Artificial Sequence
  Description of Artificial Sequence: Synthetic peptide
  Seed: HIHIFSFTGEEMATK
HIHFFSVTNEEEATK

SEQ ID NO: 279476 - protein, 15 aa, Artificial Sequence
  Description of Artificial Sequence: Synthetic peptide
  Seed: HIHIFSFTGEEMATK
HIHFFSVTNEEIATK

SEQ ID NO: 279477 - protein, 15 aa, Artificial Sequence
  Description of Artificial Sequence: Synthetic peptide
  Seed: HIHIFSFTGEEMATK
HIHFFSVTNEELATK

SEQ ID NO: 279478 - protein, 15 aa, Artificial Sequence
  Description of Artificial Sequence: Synthetic peptide
  Seed: HIHIFSFTGEEMATK
HIHFFSVTNEEMATK

SEQ ID NO: 279479 - protein, 15 aa, Artificial Sequence
  Description of Artificial Sequence: Synthetic peptide
  Seed: HIHIFSFTGEEMATK
HIHFFSVTNEENATK

SEQ ID NO: 279480 - protein, 15 aa, Artificial Sequence
  Description of Artificial Sequence: Synthetic peptide
  Seed: HIHIFSFTGEEMATK
HIHFFSVTNEESATK

SEQ ID NO: 279481 - protein, 15 aa, Artificial Sequence
  Description of Artificial Sequence: Synthetic peptide
  Seed: HIHIFSFTGEEMATK
HIHFFSVTNEETATK

SEQ ID NO: 279482 - protein, 15 aa, Artificial Sequence
  Description of Artificial Sequence: Synthetic peptide
  Seed: HIHIFSFTGEEMATK
HIHFFSVTNEEVATK

SEQ ID NO: 279483 - protein, 15 aa, Artificial Sequence
  Description of Artificial Sequence: Synthetic peptide
  Seed: HIHIFSFTGEEMATK
HIHFFSVTPEEAATK

SEQ ID NO: 279484 - protein, 15 aa, Artificial Sequence
  Description of Artificial Sequence: Synthetic peptide
  Seed: HIHIFSFTGEEMATK
HIHFFSVTPEEGATK

SEQ ID NO: 279485 - protein, 15 aa, Artificial Sequence
  Description of Artificial Sequence: Synthetic peptide
  Seed: HIHIFSFTGEEMATK
HIHFFSVTPEEHATK

SEQ ID NO: 279486 - protein, 15 aa, Artificial Sequence
  Description of Artificial Sequence: Synthetic peptide
  Seed: HIHIFSFTGEEMATK
HIHFFSVTPEEIATK

SEQ ID NO: 279487 - protein, 15 aa, Artificial Sequence
  Description of Artificial Sequence: Synthetic peptide
  Seed: HIHIFSFTGEEMATK
HIHFFSVTPEELATK

SEQ ID NO: 279488 - protein, 15 aa, Artificial Sequence
  Description of Artificial Sequence: Synthetic peptide
  Seed: HIHIFSFTGEEMATK
HIHFFSVTPEEMATK

SEQ ID NO: 279489 - protein, 15 aa, Artificial Sequence
  Description of Artificial Sequence: Synthetic peptide
  Seed: HIHIFSFTGEEMATK
HIHFFSVTPEENATK

SEQ ID NO: 279490 - protein, 15 aa, Artificial Sequence
  Description of Artificial Sequence: Synthetic peptide
  Seed: HIHIFSFTGEEMATK
HIHFFSVTPEEPATK

SEQ ID NO: 279491 - protein, 15 aa, Artificial Sequence
  Description of Artificial Sequence: Synthetic peptide
  Seed: HIHIFSFTGEEMATK
HIHFFSVTPEEQATK

SEQ ID NO: 279492 - protein, 15 aa, Artificial Sequence
  Description of Artificial Sequence: Synthetic peptide
  Seed: HIHIFSFTGEEMATK
HIHFFSVTPEESATK

SEQ ID NO: 279493 - protein, 15 aa, Artificial Sequence
  Description of Artificial Sequence: Synthetic peptide
  Seed: HIHIFSFTGEEMATK
HIHFFSVTPEETATK

SEQ ID NO: 279494 - protein, 15 aa, Artificial Sequence
  Description of Artificial Sequence: Synthetic peptide
  Seed: HIHIFSFTGEEMATK
HIHFFSVTPEEVATK

SEQ ID NO: 279495 - protein, 15 aa, Artificial Sequence
  Description of Artificial Sequence: Synthetic peptide
  Seed: HIHIFSFTGEEMATK
HIHFFSVTSEEAATK

SEQ ID NO: 279496 - protein, 15 aa, Artificial Sequence
  Description of Artificial Sequence: Synthetic peptide
  Seed: HIHIFSFTGEEMATK
HIHFFSVTSEEGATK

SEQ ID NO: 279497 - protein, 15 aa, Artificial Sequence
  Description of Artificial Sequence: Synthetic peptide
  Seed: HIHIFSFTGEEMATK
HIHFFSVTSEEHATK

SEQ ID NO: 279498 - protein, 15 aa, Artificial Sequence
  Description of Artificial Sequence: Synthetic peptide
  Seed: HIHIFSFTGEEMATK
HIHFFSVTSEEIATK

SEQ ID NO: 279499 - protein, 15 aa, Artificial Sequence
  Description of Artificial Sequence: Synthetic peptide
  Seed: HIHIFSFTGEEMATK
HIHFFSVTSEELATK

SEQ ID NO: 279500 - protein, 15 aa, Artificial Sequence
  Description of Artificial Sequence: Synthetic peptide
  Seed: HIHIFSFTGEEMATK
HIHFFSVTSEEMATK

SEQ ID NO: 279501 - protein, 15 aa, Artificial Sequence
  Description of Artificial Sequence: Synthetic peptide
  Seed: HIHIFSFTGEEMATK
HIHFFSVTSEENATK

SEQ ID NO: 279502 - protein, 15 aa, Artificial Sequence
  Description of Artificial Sequence: Synthetic peptide
  Seed: HIHIFSFTGEEMATK
HIHFFSVTSEEQATK

SEQ ID NO: 279503 - protein, 15 aa, Artificial Sequence
  Description of Artificial Sequence: Synthetic peptide
  Seed: HIHIFSFTGEEMATK
HIHFFSVTSEESATK

SEQ ID NO: 279504 - protein, 15 aa, Artificial Sequence
  Description of Artificial Sequence: Synthetic peptide
  Seed: HIHIFSFTGEEMATK
HIHFFSVTSEETATK

SEQ ID NO: 279505 - protein, 15 aa, Artificial Sequence
  Description of Artificial Sequence: Synthetic peptide
  Seed: HIHIFSFTGEEMATK
HIHFFSVTSEEVATK

SEQ ID NO: 279506 - protein, 15 aa, Artificial Sequence
  Description of Artificial Sequence: Synthetic peptide
  Seed: HIHIFSFTGEEMATK
HIHFFSVTTEEAATK

SEQ ID NO: 279507 - protein, 15 aa, Artificial Sequence
  Description of Artificial Sequence: Synthetic peptide
  Seed: HIHIFSFTGEEMATK
HIHFFSVTTEEGATK

SEQ ID NO: 279508 - protein, 15 aa, Artificial Sequence
  Description of Artificial Sequence: Synthetic peptide
  Seed: HIHIFSFTGEEMATK
HIHFFSVTTEEHATK

SEQ ID NO: 279509 - protein, 15 aa, Artificial Sequence
  Description of Artificial Sequence: Synthetic peptide
  Seed: HIHIFSFTGEEMATK
HIHFFSVTTEEIATK

SEQ ID NO: 279510 - protein, 15 aa, Artificial Sequence
  Description of Artificial Sequence: Synthetic peptide
  Seed: HIHIFSFTGEEMATK
HIHFFSVTTEELATK

SEQ ID NO: 279511 - protein, 15 aa, Artificial Sequence
  Description of Artificial Sequence: Synthetic peptide
  Seed: HIHIFSFTGEEMATK
HIHFFSVTTEEMATK

SEQ ID NO: 279512 - protein, 15 aa, Artificial Sequence
  Description of Artificial Sequence: Synthetic peptide
  Seed: HIHIFSFTGEEMATK
HIHFFSVTTEENATK

SEQ ID NO: 279513 - protein, 15 aa, Artificial Sequence
  Description of Artificial Sequence: Synthetic peptide
  Seed: HIHIFSFTGEEMATK
HIHFFSVTTEESATK

SEQ ID NO: 279514 - protein, 15 aa, Artificial Sequence
  Description of Artificial Sequence: Synthetic peptide
  Seed: HIHIFSFTGEEMATK
HIHFFSVTTEETATK

SEQ ID NO: 279515 - protein, 15 aa, Artificial Sequence
  Description of Artificial Sequence: Synthetic peptide
  Seed: HIHIFSFTGEEMATK
HIHFFSVTTEEVATK

SEQ ID NO: 279516 - protein, 15 aa, Artificial Sequence
  Description of Artificial Sequence: Synthetic peptide
  Seed: HIHIFSFTGEEMATK
HIHFFSVTVEEAATK

SEQ ID NO: 279517 - protein, 15 aa, Artificial Sequence
  Description of Artificial Sequence: Synthetic peptide
  Seed: HIHIFSFTGEEMATK
HIHFFSVTVEEFATK

SEQ ID NO: 279518 - protein, 15 aa, Artificial Sequence
  Description of Artificial Sequence: Synthetic peptide
  Seed: HIHIFSFTGEEMATK
HIHFFSVTVEEGATK

SEQ ID NO: 279519 - protein, 15 aa, Artificial Sequence
  Description of Artificial Sequence: Synthetic peptide
  Seed: HIHIFSFTGEEMATK
HIHFFSVTVEEHATK

SEQ ID NO: 279520 - protein, 15 aa, Artificial Sequence
  Description of Artificial Sequence: Synthetic peptide
  Seed: HIHIFSFTGEEMATK
HIHFFSVTVEEIATK

SEQ ID NO: 279521 - protein, 15 aa, Artificial Sequence
  Description of Artificial Sequence: Synthetic peptide
  Seed: HIHIFSFTGEEMATK
HIHFFSVTVEELATK

SEQ ID NO: 279522 - protein, 15 aa, Artificial Sequence
  Description of Artificial Sequence: Synthetic peptide
  Seed: HIHIFSFTGEEMATK
HIHFFSVTVEEMATK

SEQ ID NO: 279523 - protein, 15 aa, Artificial Sequence
  Description of Artificial Sequence: Synthetic peptide
  Seed: HIHIFSFTGEEMATK
HIHFFSVTVEENATK

SEQ ID NO: 279524 - protein, 15 aa, Artificial Sequence
  Description of Artificial Sequence: Synthetic peptide
  Seed: HIHIFSFTGEEMATK
HIHFFSVTVEEPATK

SEQ ID NO: 279525 - protein, 15 aa, Artificial Sequence
  Description of Artificial Sequence: Synthetic peptide
  Seed: HIHIFSFTGEEMATK
HIHFFSVTVEEQATK

SEQ ID NO: 279526 - protein, 15 aa, Artificial Sequence
  Description of Artificial Sequence: Synthetic peptide
  Seed: HIHIFSFTGEEMATK
HIHFFSVTVEESATK

SEQ ID NO: 279527 - protein, 15 aa, Artificial Sequence
  Description of Artificial Sequence: Synthetic peptide
  Seed: HIHIFSFTGEEMATK
HIHFFSVTVEETATK

SEQ ID NO: 279528 - protein, 15 aa, Artificial Sequence
  Description of Artificial Sequence: Synthetic peptide
  Seed: HIHIFSFTGEEMATK
HIHFFSVTVEEVATK

SEQ ID NO: 279529 - protein, 15 aa, Artificial Sequence
  Description of Artificial Sequence: Synthetic peptide
  Seed: HIHIFSFTGEEMATK
HIHFFSVTWEEAATK

SEQ ID NO: 279530 - protein, 15 aa, Artificial Sequence
  Description of Artificial Sequence: Synthetic peptide
  Seed: HIHIFSFTGEEMATK
HIHFFSVTWEEDATK

SEQ ID NO: 279531 - protein, 15 aa, Artificial Sequence
  Description of Artificial Sequence: Synthetic peptide
  Seed: HIHIFSFTGEEMATK
HIHFFSVTWEEEATK

SEQ ID NO: 279532 - protein, 15 aa, Artificial Sequence
  Description of Artificial Sequence: Synthetic peptide
  Seed: HIHIFSFTGEEMATK
HIHFFSVTWEEFATK

SEQ ID NO: 279533 - protein, 15 aa, Artificial Sequence
  Description of Artificial Sequence: Synthetic peptide
  Seed: HIHIFSFTGEEMATK
HIHFFSVTWEEHATK

SEQ ID NO: 279534 - protein, 15 aa, Artificial Sequence
  Description of Artificial Sequence: Synthetic peptide
  Seed: HIHIFSFTGEEMATK
HIHFFSVTWEEIATK

SEQ ID NO: 279535 - protein, 15 aa, Artificial Sequence
  Description of Artificial Sequence: Synthetic peptide
  Seed: HIHIFSFTGEEMATK
HIHFFSVTWEELATK

SEQ ID NO: 279536 - protein, 15 aa, Artificial Sequence
  Description of Artificial Sequence: Synthetic peptide
  Seed: HIHIFSFTGEEMATK
HIHFFSVTWEEMATK

SEQ ID NO: 279537 - protein, 15 aa, Artificial Sequence
  Description of Artificial Sequence: Synthetic peptide
  Seed: HIHIFSFTGEEMATK
HIHFFSVTWEENATK

SEQ ID NO: 279538 - protein, 15 aa, Artificial Sequence
  Description of Artificial Sequence: Synthetic peptide
  Seed: HIHIFSFTGEEMATK
HIHFFSVTWEEPATK

SEQ ID NO: 279539 - protein, 15 aa, Artificial Sequence
  Description of Artificial Sequence: Synthetic peptide
  Seed: HIHIFSFTGEEMATK
HIHFFSVTWEESATK

SEQ ID NO: 279540 - protein, 15 aa, Artificial Sequence
  Description of Artificial Sequence: Synthetic peptide
  Seed: HIHIFSFTGEEMATK
HIHFFSVTWEETATK

SEQ ID NO: 279541 - protein, 15 aa, Artificial Sequence
  Description of Artificial Sequence: Synthetic peptide
  Seed: HIHIFSFTGEEMATK
HIHFFSVTWEEVATK

SEQ ID NO: 279542 - protein, 15 aa, Artificial Sequence
  Description of Artificial Sequence: Synthetic peptide
  Seed: HIHIFSFTGEEMATK
HIHFFSVTWEEYATK

SEQ ID NO: 279543 - protein, 15 aa, Artificial Sequence
  Description of Artificial Sequence: Synthetic peptide
  Seed: HIHIFSFTGEEMATK
HIHFFSVTYEEAATK

SEQ ID NO: 279544 - protein, 15 aa, Artificial Sequence
  Description of Artificial Sequence: Synthetic peptide
  Seed: HIHIFSFTGEEMATK
HIHFFSVTYEEDATK

SEQ ID NO: 279545 - protein, 15 aa, Artificial Sequence
  Description of Artificial Sequence: Synthetic peptide
  Seed: HIHIFSFTGEEMATK
HIHFFSVTYEEEATK

SEQ ID NO: 279546 - protein, 15 aa, Artificial Sequence
  Description of Artificial Sequence: Synthetic peptide
  Seed: HIHIFSFTGEEMATK
HIHFFSVTYEEFATK

SEQ ID NO: 279547 - protein, 15 aa, Artificial Sequence
  Description of Artificial Sequence: Synthetic peptide
  Seed: HIHIFSFTGEEMATK
HIHFFSVTYEEHATK

SEQ ID NO: 279548 - protein, 15 aa, Artificial Sequence
  Description of Artificial Sequence: Synthetic peptide
  Seed: HIHIFSFTGEEMATK
HIHFFSVTYEEIATK

SEQ ID NO: 279549 - protein, 15 aa, Artificial Sequence
  Description of Artificial Sequence: Synthetic peptide
  Seed: HIHIFSFTGEEMATK
HIHFFSVTYEELATK

SEQ ID NO: 279550 - protein, 15 aa, Artificial Sequence
  Description of Artificial Sequence: Synthetic peptide
  Seed: HIHIFSFTGEEMATK
HIHFFSVTYEEMATK

SEQ ID NO: 279551 - protein, 15 aa, Artificial Sequence
  Description of Artificial Sequence: Synthetic peptide
  Seed: HIHIFSFTGEEMATK
HIHFFSVTYEENATK

SEQ ID NO: 279552 - protein, 15 aa, Artificial Sequence
  Description of Artificial Sequence: Synthetic peptide
  Seed: HIHIFSFTGEEMATK
HIHFFSVTYEEPATK

SEQ ID NO: 279553 - protein, 15 aa, Artificial Sequence
  Description of Artificial Sequence: Synthetic peptide
  Seed: HIHIFSFTGEEMATK
HIHFFSVTYEEQATK

SEQ ID NO: 279554 - protein, 15 aa, Artificial Sequence
  Description of Artificial Sequence: Synthetic peptide
  Seed: HIHIFSFTGEEMATK
HIHFFSVTYEERATK

SEQ ID NO: 279555 - protein, 15 aa, Artificial Sequence
  Description of Artificial Sequence: Synthetic peptide
  Seed: HIHIFSFTGEEMATK
HIHFFSVTYEESATK

SEQ ID NO: 279556 - protein, 15 aa, Artificial Sequence
  Description of Artificial Sequence: Synthetic peptide
  Seed: HIHIFSFTGEEMATK
HIHFFSVTYEETATK

SEQ ID NO: 279557 - protein, 15 aa, Artificial Sequence
  Description of Artificial Sequence: Synthetic peptide
  Seed: HIHIFSFTGEEMATK
HIHFFSVTYEEVATK

SEQ ID NO: 279558 - protein, 15 aa, Artificial Sequence
  Description of Artificial Sequence: Synthetic peptide
  Seed: HIHIFSFTGEEMATK
HIHFFSVTYEEWATK

SEQ ID NO: 279559 - protein, 15 aa, Artificial Sequence
  Description of Artificial Sequence: Synthetic peptide
  Seed: HIHIFSFTGEEMATK
HIHFFSVTYEEYATK

SEQ ID NO: 279560 - protein, 15 aa, Artificial Sequence
  Description of Artificial Sequence: Synthetic peptide
  Seed: HIHIFSFTGEEMATK
HIHFFSWTAEEAATK

SEQ ID NO: 279561 - protein, 15 aa, Artificial Sequence
  Description of Artificial Sequence: Synthetic peptide
  Seed: HIHIFSFTGEEMATK
HIHFFSWTAEEFATK

SEQ ID NO: 279562 - protein, 15 aa, Artificial Sequence
  Description of Artificial Sequence: Synthetic peptide
  Seed: HIHIFSFTGEEMATK
HIHFFSWTAEEIATK

SEQ ID NO: 279563 - protein, 15 aa, Artificial Sequence
  Description of Artificial Sequence: Synthetic peptide
  Seed: HIHIFSFTGEEMATK
HIHFFSWTAEELATK

SEQ ID NO: 279564 - protein, 15 aa, Artificial Sequence
  Description of Artificial Sequence: Synthetic peptide
  Seed: HIHIFSFTGEEMATK
HIHFFSWTFEEAATK

SEQ ID NO: 279565 - protein, 15 aa, Artificial Sequence
  Description of Artificial Sequence: Synthetic peptide
  Seed: HIHIFSFTGEEMATK
HIHFFSWTFEEEATK

SEQ ID NO: 279566 - protein, 15 aa, Artificial Sequence
  Description of Artificial Sequence: Synthetic peptide
  Seed: HIHIFSFTGEEMATK
HIHFFSWTFEEFATK

SEQ ID NO: 279567 - protein, 15 aa, Artificial Sequence
  Description of Artificial Sequence: Synthetic peptide
  Seed: HIHIFSFTGEEMATK
HIHFFSWTFEEHATK

SEQ ID NO: 279568 - protein, 15 aa, Artificial Sequence
  Description of Artificial Sequence: Synthetic peptide
  Seed: HIHIFSFTGEEMATK
HIHFFSWTFEEIATK

SEQ ID NO: 279569 - protein, 15 aa, Artificial Sequence
  Description of Artificial Sequence: Synthetic peptide
  Seed: HIHIFSFTGEEMATK
HIHFFSWTFEELATK

SEQ ID NO: 279570 - protein, 15 aa, Artificial Sequence
  Description of Artificial Sequence: Synthetic peptide
  Seed: HIHIFSFTGEEMATK
HIHFFSWTFEEMATK

SEQ ID NO: 279571 - protein, 15 aa, Artificial Sequence
  Description of Artificial Sequence: Synthetic peptide
  Seed: HIHIFSFTGEEMATK
HIHFFSWTFEENATK

SEQ ID NO: 279572 - protein, 15 aa, Artificial Sequence
  Description of Artificial Sequence: Synthetic peptide
  Seed: HIHIFSFTGEEMATK
HIHFFSWTFEERATK

SEQ ID NO: 279573 - protein, 15 aa, Artificial Sequence
  Description of Artificial Sequence: Synthetic peptide
  Seed: HIHIFSFTGEEMATK
HIHFFSWTFEESATK

SEQ ID NO: 279574 - protein, 15 aa, Artificial Sequence
  Description of Artificial Sequence: Synthetic peptide
  Seed: HIHIFSFTGEEMATK
HIHFFSWTFEETATK

SEQ ID NO: 279575 - protein, 15 aa, Artificial Sequence
  Description of Artificial Sequence: Synthetic peptide
  Seed: HIHIFSFTGEEMATK
HIHFFSWTFEEVATK

SEQ ID NO: 279576 - protein, 15 aa, Artificial Sequence
  Description of Artificial Sequence: Synthetic peptide
  Seed: HIHIFSFTGEEMATK
HIHFFSWTFEEWATK

SEQ ID NO: 279577 - protein, 15 aa, Artificial Sequence
  Description of Artificial Sequence: Synthetic peptide
  Seed: HIHIFSFTGEEMATK
HIHFFSWTFEEYATK

SEQ ID NO: 279578 - protein, 15 aa, Artificial Sequence
  Description of Artificial Sequence: Synthetic peptide
  Seed: HIHIFSFTGEEMATK
HIHFFSWTIEEFATK

SEQ ID NO: 279579 - protein, 15 aa, Artificial Sequence
  Description of Artificial Sequence: Synthetic peptide
  Seed: HIHIFSFTGEEMATK
HIHFFSWTIEEIATK

SEQ ID NO: 279580 - protein, 15 aa, Artificial Sequence
  Description of Artificial Sequence: Synthetic peptide
  Seed: HIHIFSFTGEEMATK
HIHFFSWTIEELATK

SEQ ID NO: 279581 - protein, 15 aa, Artificial Sequence
  Description of Artificial Sequence: Synthetic peptide
  Seed: HIHIFSFTGEEMATK
HIHFFSWTIEEMATK

SEQ ID NO: 279582 - protein, 15 aa, Artificial Sequence
  Description of Artificial Sequence: Synthetic peptide
  Seed: HIHIFSFTGEEMATK
HIHFFSWTIEEVATK

SEQ ID NO: 279583 - protein, 15 aa, Artificial Sequence
  Description of Artificial Sequence: Synthetic peptide
  Seed: HIHIFSFTGEEMATK
HIHFFSWTIEEYATK

SEQ ID NO: 279584 - protein, 15 aa, Artificial Sequence
  Description of Artificial Sequence: Synthetic peptide
  Seed: HIHIFSFTGEEMATK
HIHFFSWTLEEAATK

SEQ ID NO: 279585 - protein, 15 aa, Artificial Sequence
  Description of Artificial Sequence: Synthetic peptide
  Seed: HIHIFSFTGEEMATK
HIHFFSWTLEEFATK

SEQ ID NO: 279586 - protein, 15 aa, Artificial Sequence
  Description of Artificial Sequence: Synthetic peptide
  Seed: HIHIFSFTGEEMATK
HIHFFSWTLEEIATK

SEQ ID NO: 279587 - protein, 15 aa, Artificial Sequence
  Description of Artificial Sequence: Synthetic peptide
  Seed: HIHIFSFTGEEMATK
HIHFFSWTLEELATK

SEQ ID NO: 279588 - protein, 15 aa, Artificial Sequence
  Description of Artificial Sequence: Synthetic peptide
  Seed: HIHIFSFTGEEMATK
HIHFFSWTLEEMATK

SEQ ID NO: 279589 - protein, 15 aa, Artificial Sequence
  Description of Artificial Sequence: Synthetic peptide
  Seed: HIHIFSFTGEEMATK
HIHFFSWTLEESATK

SEQ ID NO: 279590 - protein, 15 aa, Artificial Sequence
  Description of Artificial Sequence: Synthetic peptide
  Seed: HIHIFSFTGEEMATK
HIHFFSWTLEETATK

SEQ ID NO: 279591 - protein, 15 aa, Artificial Sequence
  Description of Artificial Sequence: Synthetic peptide
  Seed: HIHIFSFTGEEMATK
HIHFFSWTLEEVATK

SEQ ID NO: 279592 - protein, 15 aa, Artificial Sequence
  Description of Artificial Sequence: Synthetic peptide
  Seed: HIHIFSFTGEEMATK
HIHFFSWTLEEYATK

SEQ ID NO: 279593 - protein, 15 aa, Artificial Sequence
  Description of Artificial Sequence: Synthetic peptide
  Seed: HIHIFSFTGEEMATK
HIHFFSWTMEEFATK

SEQ ID NO: 279594 - protein, 15 aa, Artificial Sequence
  Description of Artificial Sequence: Synthetic peptide
  Seed: HIHIFSFTGEEMATK
HIHFFSWTMEEIATK

SEQ ID NO: 279595 - protein, 15 aa, Artificial Sequence
  Description of Artificial Sequence: Synthetic peptide
  Seed: HIHIFSFTGEEMATK
HIHFFSWTMEELATK

SEQ ID NO: 279596 - protein, 15 aa, Artificial Sequence
  Description of Artificial Sequence: Synthetic peptide
  Seed: HIHIFSFTGEEMATK
HIHFFSWTMEEMATK

SEQ ID NO: 279597 - protein, 15 aa, Artificial Sequence
  Description of Artificial Sequence: Synthetic peptide
  Seed: HIHIFSFTGEEMATK
HIHFFSWTMEEVATK

SEQ ID NO: 279598 - protein, 15 aa, Artificial Sequence
  Description of Artificial Sequence: Synthetic peptide
  Seed: HIHIFSFTGEEMATK
HIHFFSWTMEEYATK

SEQ ID NO: 279599 - protein, 15 aa, Artificial Sequence
  Description of Artificial Sequence: Synthetic peptide
  Seed: HIHIFSFTGEEMATK
HIHFFSWTVEEFATK

SEQ ID NO: 279600 - protein, 15 aa, Artificial Sequence
  Description of Artificial Sequence: Synthetic peptide
  Seed: HIHIFSFTGEEMATK
HIHFFSWTVEEIATK

SEQ ID NO: 279601 - protein, 15 aa, Artificial Sequence
  Description of Artificial Sequence: Synthetic peptide
  Seed: HIHIFSFTGEEMATK
HIHFFSWTVEELATK

SEQ ID NO: 279602 - protein, 15 aa, Artificial Sequence
  Description of Artificial Sequence: Synthetic peptide
  Seed: HIHIFSFTGEEMATK
HIHFFSWTVEEVATK

SEQ ID NO: 279603 - protein, 15 aa, Artificial Sequence
  Description of Artificial Sequence: Synthetic peptide
  Seed: HIHIFSFTGEEMATK
HIHFFSWTWEEFATK

SEQ ID NO: 279604 - protein, 15 aa, Artificial Sequence
  Description of Artificial Sequence: Synthetic peptide
  Seed: HIHIFSFTGEEMATK
HIHFFSWTWEEIATK

SEQ ID NO: 279605 - protein, 15 aa, Artificial Sequence
  Description of Artificial Sequence: Synthetic peptide
  Seed: HIHIFSFTGEEMATK
HIHFFSWTWEELATK

SEQ ID NO: 279606 - protein, 15 aa, Artificial Sequence
  Description of Artificial Sequence: Synthetic peptide
  Seed: HIHIFSFTGEEMATK
HIHFFSWTWEEMATK

SEQ ID NO: 279607 - protein, 15 aa, Artificial Sequence
  Description of Artificial Sequence: Synthetic peptide
  Seed: HIHIFSFTGEEMATK
HIHFFSWTWEEVATK

SEQ ID NO: 279608 - protein, 15 aa, Artificial Sequence
  Description of Artificial Sequence: Synthetic peptide
  Seed: HIHIFSFTGEEMATK
HIHFFSWTYEEFATK

SEQ ID NO: 279609 - protein, 15 aa, Artificial Sequence
  Description of Artificial Sequence: Synthetic peptide
  Seed: HIHIFSFTGEEMATK
HIHFFSWTYEEIATK

SEQ ID NO: 279610 - protein, 15 aa, Artificial Sequence
  Description of Artificial Sequence: Synthetic peptide
  Seed: HIHIFSFTGEEMATK
HIHFFSWTYEELATK

SEQ ID NO: 279611 - protein, 15 aa, Artificial Sequence
  Description of Artificial Sequence: Synthetic peptide
  Seed: HIHIFSFTGEEMATK
HIHFFSWTYEEMATK

SEQ ID NO: 279612 - protein, 15 aa, Artificial Sequence
  Description of Artificial Sequence: Synthetic peptide
  Seed: HIHIFSFTGEEMATK
HIHFFSWTYEEVATK

SEQ ID NO: 279613 - protein, 15 aa, Artificial Sequence
  Description of Artificial Sequence: Synthetic peptide
  Seed: HIHIFSFTGEEMATK
HIHFFSWTYEEYATK

SEQ ID NO: 279614 - protein, 15 aa, Artificial Sequence
  Description of Artificial Sequence: Synthetic peptide
  Seed: HIHIFSFTGEEMATK
HIHFFSYTAEEFATK

SEQ ID NO: 279615 - protein, 15 aa, Artificial Sequence
  Description of Artificial Sequence: Synthetic peptide
  Seed: HIHIFSFTGEEMATK
HIHFFSYTAEEIATK

SEQ ID NO: 279616 - protein, 15 aa, Artificial Sequence
  Description of Artificial Sequence: Synthetic peptide
  Seed: HIHIFSFTGEEMATK
HIHFFSYTAEELATK

SEQ ID NO: 279617 - protein, 15 aa, Artificial Sequence
  Description of Artificial Sequence: Synthetic peptide
  Seed: HIHIFSFTGEEMATK
HIHFFSYTFEEAATK

SEQ ID NO: 279618 - protein, 15 aa, Artificial Sequence
  Description of Artificial Sequence: Synthetic peptide
  Seed: HIHIFSFTGEEMATK
HIHFFSYTFEEDATK

SEQ ID NO: 279619 - protein, 15 aa, Artificial Sequence
  Description of Artificial Sequence: Synthetic peptide
  Seed: HIHIFSFTGEEMATK
HIHFFSYTFEEEATK

SEQ ID NO: 279620 - protein, 15 aa, Artificial Sequence
  Description of Artificial Sequence: Synthetic peptide
  Seed: HIHIFSFTGEEMATK
HIHFFSYTFEEFATK

SEQ ID NO: 279621 - protein, 15 aa, Artificial Sequence
  Description of Artificial Sequence: Synthetic peptide
  Seed: HIHIFSFTGEEMATK
HIHFFSYTFEEHATK

SEQ ID NO: 279622 - protein, 15 aa, Artificial Sequence
  Description of Artificial Sequence: Synthetic peptide
  Seed: HIHIFSFTGEEMATK
HIHFFSYTFEEIATK

SEQ ID NO: 279623 - protein, 15 aa, Artificial Sequence
  Description of Artificial Sequence: Synthetic peptide
  Seed: HIHIFSFTGEEMATK
HIHFFSYTFEEKATK

SEQ ID NO: 279624 - protein, 15 aa, Artificial Sequence
  Description of Artificial Sequence: Synthetic peptide
  Seed: HIHIFSFTGEEMATK
HIHFFSYTFEELATK

SEQ ID NO: 279625 - protein, 15 aa, Artificial Sequence
  Description of Artificial Sequence: Synthetic peptide
  Seed: HIHIFSFTGEEMATK
HIHFFSYTFEEMATK

SEQ ID NO: 279626 - protein, 15 aa, Artificial Sequence
  Description of Artificial Sequence: Synthetic peptide
  Seed: HIHIFSFTGEEMATK
HIHFFSYTFEENATK

SEQ ID NO: 279627 - protein, 15 aa, Artificial Sequence
  Description of Artificial Sequence: Synthetic peptide
  Seed: HIHIFSFTGEEMATK
HIHFFSYTFEEPATK

SEQ ID NO: 279628 - protein, 15 aa, Artificial Sequence
  Description of Artificial Sequence: Synthetic peptide
  Seed: HIHIFSFTGEEMATK
HIHFFSYTFEEQATK

SEQ ID NO: 279629 - protein, 15 aa, Artificial Sequence
  Description of Artificial Sequence: Synthetic peptide
  Seed: HIHIFSFTGEEMATK
HIHFFSYTFEERATK

SEQ ID NO: 279630 - protein, 15 aa, Artificial Sequence
  Description of Artificial Sequence: Synthetic peptide
  Seed: HIHIFSFTGEEMATK
HIHFFSYTFEESATK

SEQ ID NO: 279631 - protein, 15 aa, Artificial Sequence
  Description of Artificial Sequence: Synthetic peptide
  Seed: HIHIFSFTGEEMATK
HIHFFSYTFEETATK

SEQ ID NO: 279632 - protein, 15 aa, Artificial Sequence
  Description of Artificial Sequence: Synthetic peptide
  Seed: HIHIFSFTGEEMATK
HIHFFSYTFEEVATK

SEQ ID NO: 279633 - protein, 15 aa, Artificial Sequence
  Description of Artificial Sequence: Synthetic peptide
  Seed: HIHIFSFTGEEMATK
HIHFFSYTFEEWATK

SEQ ID NO: 279634 - protein, 15 aa, Artificial Sequence
  Description of Artificial Sequence: Synthetic peptide
  Seed: HIHIFSFTGEEMATK
HIHFFSYTFEEYATK

SEQ ID NO: 279635 - protein, 15 aa, Artificial Sequence
  Description of Artificial Sequence: Synthetic peptide
  Seed: HIHIFSFTGEEMATK
HIHFFSYTIEEFATK

SEQ ID NO: 279636 - protein, 15 aa, Artificial Sequence
  Description of Artificial Sequence: Synthetic peptide
  Seed: HIHIFSFTGEEMATK
HIHFFSYTIEEIATK

SEQ ID NO: 279637 - protein, 15 aa, Artificial Sequence
  Description of Artificial Sequence: Synthetic peptide
  Seed: HIHIFSFTGEEMATK
HIHFFSYTIEELATK

SEQ ID NO: 279638 - protein, 15 aa, Artificial Sequence
  Description of Artificial Sequence: Synthetic peptide
  Seed: HIHIFSFTGEEMATK
HIHFFSYTIEEMATK

SEQ ID NO: 279639 - protein, 15 aa, Artificial Sequence
  Description of Artificial Sequence: Synthetic peptide
  Seed: HIHIFSFTGEEMATK
HIHFFSYTIEETATK

SEQ ID NO: 279640 - protein, 15 aa, Artificial Sequence
  Description of Artificial Sequence: Synthetic peptide
  Seed: HIHIFSFTGEEMATK
HIHFFSYTIEEVATK

SEQ ID NO: 279641 - protein, 15 aa, Artificial Sequence
  Description of Artificial Sequence: Synthetic peptide
  Seed: HIHIFSFTGEEMATK
HIHFFSYTIEEYATK

SEQ ID NO: 279642 - protein, 15 aa, Artificial Sequence
  Description of Artificial Sequence: Synthetic peptide
  Seed: HIHIFSFTGEEMATK
HIHFFSYTLEEAATK

SEQ ID NO: 279643 - protein, 15 aa, Artificial Sequence
  Description of Artificial Sequence: Synthetic peptide
  Seed: HIHIFSFTGEEMATK
HIHFFSYTLEEFATK

SEQ ID NO: 279644 - protein, 15 aa, Artificial Sequence
  Description of Artificial Sequence: Synthetic peptide
  Seed: HIHIFSFTGEEMATK
HIHFFSYTLEEIATK

SEQ ID NO: 279645 - protein, 15 aa, Artificial Sequence
  Description of Artificial Sequence: Synthetic peptide
  Seed: HIHIFSFTGEEMATK
HIHFFSYTLEELATK

SEQ ID NO: 279646 - protein, 15 aa, Artificial Sequence
  Description of Artificial Sequence: Synthetic peptide
  Seed: HIHIFSFTGEEMATK
HIHFFSYTLEEMATK

SEQ ID NO: 279647 - protein, 15 aa, Artificial Sequence
  Description of Artificial Sequence: Synthetic peptide
  Seed: HIHIFSFTGEEMATK
HIHFFSYTLEERATK

SEQ ID NO: 279648 - protein, 15 aa, Artificial Sequence
  Description of Artificial Sequence: Synthetic peptide
  Seed: HIHIFSFTGEEMATK
HIHFFSYTLEESATK

SEQ ID NO: 279649 - protein, 15 aa, Artificial Sequence
  Description of Artificial Sequence: Synthetic peptide
  Seed: HIHIFSFTGEEMATK
HIHFFSYTLEETATK

SEQ ID NO: 279650 - protein, 15 aa, Artificial Sequence
  Description of Artificial Sequence: Synthetic peptide
  Seed: HIHIFSFTGEEMATK
HIHFFSYTLEEVATK

SEQ ID NO: 279651 - protein, 15 aa, Artificial Sequence
  Description of Artificial Sequence: Synthetic peptide
  Seed: HIHIFSFTGEEMATK
HIHFFSYTLEEYATK

SEQ ID NO: 279652 - protein, 15 aa, Artificial Sequence
  Description of Artificial Sequence: Synthetic peptide
  Seed: HIHIFSFTGEEMATK
HIHFFSYTMEEFATK

SEQ ID NO: 279653 - protein, 15 aa, Artificial Sequence
  Description of Artificial Sequence: Synthetic peptide
  Seed: HIHIFSFTGEEMATK
HIHFFSYTMEEIATK

SEQ ID NO: 279654 - protein, 15 aa, Artificial Sequence
  Description of Artificial Sequence: Synthetic peptide
  Seed: HIHIFSFTGEEMATK
HIHFFSYTMEELATK

SEQ ID NO: 279655 - protein, 15 aa, Artificial Sequence
  Description of Artificial Sequence: Synthetic peptide
  Seed: HIHIFSFTGEEMATK
HIHFFSYTMEEMATK

SEQ ID NO: 279656 - protein, 15 aa, Artificial Sequence
  Description of Artificial Sequence: Synthetic peptide
  Seed: HIHIFSFTGEEMATK
HIHFFSYTMEEVATK

SEQ ID NO: 279657 - protein, 15 aa, Artificial Sequence
  Description of Artificial Sequence: Synthetic peptide
  Seed: HIHIFSFTGEEMATK
HIHFFSYTMEEYATK

SEQ ID NO: 279658 - protein, 15 aa, Artificial Sequence
  Description of Artificial Sequence: Synthetic peptide
  Seed: HIHIFSFTGEEMATK
HIHFFSYTVEEFATK

SEQ ID NO: 279659 - protein, 15 aa, Artificial Sequence
  Description of Artificial Sequence: Synthetic peptide
  Seed: HIHIFSFTGEEMATK
HIHFFSYTVEEIATK

SEQ ID NO: 279660 - protein, 15 aa, Artificial Sequence
  Description of Artificial Sequence: Synthetic peptide
  Seed: HIHIFSFTGEEMATK
HIHFFSYTVEELATK

SEQ ID NO: 279661 - protein, 15 aa, Artificial Sequence
  Description of Artificial Sequence: Synthetic peptide
  Seed: HIHIFSFTGEEMATK
HIHFFSYTVEEMATK

SEQ ID NO: 279662 - protein, 15 aa, Artificial Sequence
  Description of Artificial Sequence: Synthetic peptide
  Seed: HIHIFSFTGEEMATK
HIHFFSYTVEEVATK

SEQ ID NO: 279663 - protein, 15 aa, Artificial Sequence
  Description of Artificial Sequence: Synthetic peptide
  Seed: HIHIFSFTGEEMATK
HIHFFSYTWEEAATK

SEQ ID NO: 279664 - protein, 15 aa, Artificial Sequence
  Description of Artificial Sequence: Synthetic peptide
  Seed: HIHIFSFTGEEMATK
HIHFFSYTWEEFATK

SEQ ID NO: 279665 - protein, 15 aa, Artificial Sequence
  Description of Artificial Sequence: Synthetic peptide
  Seed: HIHIFSFTGEEMATK
HIHFFSYTWEEIATK

SEQ ID NO: 279666 - protein, 15 aa, Artificial Sequence
  Description of Artificial Sequence: Synthetic peptide
  Seed: HIHIFSFTGEEMATK
HIHFFSYTWEELATK

SEQ ID NO: 279667 - protein, 15 aa, Artificial Sequence
  Description of Artificial Sequence: Synthetic peptide
  Seed: HIHIFSFTGEEMATK
HIHFFSYTWEEMATK

SEQ ID NO: 279668 - protein, 15 aa, Artificial Sequence
  Description of Artificial Sequence: Synthetic peptide
  Seed: HIHIFSFTGEEMATK
HIHFFSYTWEETATK

SEQ ID NO: 279669 - protein, 15 aa, Artificial Sequence
  Description of Artificial Sequence: Synthetic peptide
  Seed: HIHIFSFTGEEMATK
HIHFFSYTWEEVATK

SEQ ID NO: 279670 - protein, 15 aa, Artificial Sequence
  Description of Artificial Sequence: Synthetic peptide
  Seed: HIHIFSFTGEEMATK
HIHFFSYTWEEYATK

SEQ ID NO: 279671 - protein, 15 aa, Artificial Sequence
  Description of Artificial Sequence: Synthetic peptide
  Seed: HIHIFSFTGEEMATK
HIHFFSYTYEEAATK

SEQ ID NO: 279672 - protein, 15 aa, Artificial Sequence
  Description of Artificial Sequence: Synthetic peptide
  Seed: HIHIFSFTGEEMATK
HIHFFSYTYEEFATK

SEQ ID NO: 279673 - protein, 15 aa, Artificial Sequence
  Description of Artificial Sequence: Synthetic peptide
  Seed: HIHIFSFTGEEMATK
HIHFFSYTYEEIATK

SEQ ID NO: 279674 - protein, 15 aa, Artificial Sequence
  Description of Artificial Sequence: Synthetic peptide
  Seed: HIHIFSFTGEEMATK
HIHFFSYTYEELATK

SEQ ID NO: 279675 - protein, 15 aa, Artificial Sequence
  Description of Artificial Sequence: Synthetic peptide
  Seed: HIHIFSFTGEEMATK
HIHFFSYTYEEMATK

SEQ ID NO: 279676 - protein, 15 aa, Artificial Sequence
  Description of Artificial Sequence: Synthetic peptide
  Seed: HIHIFSFTGEEMATK
HIHFFSYTYEETATK

SEQ ID NO: 279677 - protein, 15 aa, Artificial Sequence
  Description of Artificial Sequence: Synthetic peptide
  Seed: HIHIFSFTGEEMATK
HIHFFSYTYEEVATK

SEQ ID NO: 279678 - protein, 15 aa, Artificial Sequence
  Description of Artificial Sequence: Synthetic peptide
  Seed: HIHIFSFTGEEMATK
HIHFFSYTYEEYATK

SEQ ID NO: 279679 - protein, 15 aa, Artificial Sequence
  Description of Artificial Sequence: Synthetic peptide
  Seed: HIHIFSFTGEEMATK
HIHHFSFTFEEFATK

SEQ ID NO: 279680 - protein, 15 aa, Artificial Sequence
  Description of Artificial Sequence: Synthetic peptide
  Seed: HIHIFSFTGEEMATK
HIHHFSFTFEEIATK

SEQ ID NO: 279681 - protein, 15 aa, Artificial Sequence
  Description of Artificial Sequence: Synthetic peptide
  Seed: HIHIFSFTGEEMATK
HIHHFSFTFEELATK

SEQ ID NO: 279682 - protein, 15 aa, Artificial Sequence
  Description of Artificial Sequence: Synthetic peptide
  Seed: HIHIFSFTGEEMATK
HIHHFSFTFEEVATK

SEQ ID NO: 279683 - protein, 15 aa, Artificial Sequence
  Description of Artificial Sequence: Synthetic peptide
  Seed: HIHIFSFTGEEMATK
HIHHFSITFEEFATK

SEQ ID NO: 279684 - protein, 15 aa, Artificial Sequence
  Description of Artificial Sequence: Synthetic peptide
  Seed: HIHIFSFTGEEMATK
HIHHFSITFEEIATK

SEQ ID NO: 279685 - protein, 15 aa, Artificial Sequence
  Description of Artificial Sequence: Synthetic peptide
  Seed: HIHIFSFTGEEMATK
HIHHFSITFEELATK

SEQ ID NO: 279686 - protein, 15 aa, Artificial Sequence
  Description of Artificial Sequence: Synthetic peptide
  Seed: HIHIFSFTGEEMATK
HIHHFSITFEEVATK

SEQ ID NO: 279687 - protein, 15 aa, Artificial Sequence
  Description of Artificial Sequence: Synthetic peptide
  Seed: HIHIFSFTGEEMATK
HIHHFSLTFEEIATK

SEQ ID NO: 279688 - protein, 15 aa, Artificial Sequence
  Description of Artificial Sequence: Synthetic peptide
  Seed: HIHIFSFTGEEMATK
HIHHFSLTFEELATK

SEQ ID NO: 279689 - protein, 15 aa, Artificial Sequence
  Description of Artificial Sequence: Synthetic peptide
  Seed: HIHIFSFTGEEMATK
HIHHFSLTFEEVATK

SEQ ID NO: 279690 - protein, 15 aa, Artificial Sequence
  Description of Artificial Sequence: Synthetic peptide
  Seed: HIHIFSFTGEEMATK
HIHHFSTTFEELATK

SEQ ID NO: 279691 - protein, 15 aa, Artificial Sequence
  Description of Artificial Sequence: Synthetic peptide
  Seed: HIHIFSFTGEEMATK
HIHHFSVTFEEIATK

SEQ ID NO: 279692 - protein, 15 aa, Artificial Sequence
  Description of Artificial Sequence: Synthetic peptide
  Seed: HIHIFSFTGEEMATK
HIHHFSVTFEELATK

SEQ ID NO: 279693 - protein, 15 aa, Artificial Sequence
  Description of Artificial Sequence: Synthetic peptide
  Seed: HIHIFSFTGEEMATK
HIHIFSATAEEAATK

SEQ ID NO: 279694 - protein, 15 aa, Artificial Sequence
  Description of Artificial Sequence: Synthetic peptide
  Seed: HIHIFSFTGEEMATK
HIHIFSATAEEIATK

SEQ ID NO: 279695 - protein, 15 aa, Artificial Sequence
  Description of Artificial Sequence: Synthetic peptide
  Seed: HIHIFSFTGEEMATK
HIHIFSATAEELATK

SEQ ID NO: 279696 - protein, 15 aa, Artificial Sequence
  Description of Artificial Sequence: Synthetic peptide
  Seed: HIHIFSFTGEEMATK
HIHIFSATAEEMATK

SEQ ID NO: 279697 - protein, 15 aa, Artificial Sequence
  Description of Artificial Sequence: Synthetic peptide
  Seed: HIHIFSFTGEEMATK
HIHIFSATAEEVATK

SEQ ID NO: 279698 - protein, 15 aa, Artificial Sequence
  Description of Artificial Sequence: Synthetic peptide
  Seed: HIHIFSFTGEEMATK
HIHIFSATFEEAATK

SEQ ID NO: 279699 - protein, 15 aa, Artificial Sequence
  Description of Artificial Sequence: Synthetic peptide
  Seed: HIHIFSFTGEEMATK
HIHIFSATFEEDATK

SEQ ID NO: 279700 - protein, 15 aa, Artificial Sequence
  Description of Artificial Sequence: Synthetic peptide
  Seed: HIHIFSFTGEEMATK
HIHIFSATFEEEATK

SEQ ID NO: 279701 - protein, 15 aa, Artificial Sequence
  Description of Artificial Sequence: Synthetic peptide
  Seed: HIHIFSFTGEEMATK
HIHIFSATFEEFATK

SEQ ID NO: 279702 - protein, 15 aa, Artificial Sequence
  Description of Artificial Sequence: Synthetic peptide
  Seed: HIHIFSFTGEEMATK
HIHIFSATFEEHATK

SEQ ID NO: 279703 - protein, 15 aa, Artificial Sequence
  Description of Artificial Sequence: Synthetic peptide
  Seed: HIHIFSFTGEEMATK
HIHIFSATFEEIATK

SEQ ID NO: 279704 - protein, 15 aa, Artificial Sequence
  Description of Artificial Sequence: Synthetic peptide
  Seed: HIHIFSFTGEEMATK
HIHIFSATFEELATK

SEQ ID NO: 279705 - protein, 15 aa, Artificial Sequence
  Description of Artificial Sequence: Synthetic peptide
  Seed: HIHIFSFTGEEMATK
HIHIFSATFEEMATK

SEQ ID NO: 279706 - protein, 15 aa, Artificial Sequence
  Description of Artificial Sequence: Synthetic peptide
  Seed: HIHIFSFTGEEMATK
HIHIFSATFEENATK

SEQ ID NO: 279707 - protein, 15 aa, Artificial Sequence
  Description of Artificial Sequence: Synthetic peptide
  Seed: HIHIFSFTGEEMATK
HIHIFSATFEEPATK

SEQ ID NO: 279708 - protein, 15 aa, Artificial Sequence
  Description of Artificial Sequence: Synthetic peptide
  Seed: HIHIFSFTGEEMATK
HIHIFSATFEEQATK

SEQ ID NO: 279709 - protein, 15 aa, Artificial Sequence
  Description of Artificial Sequence: Synthetic peptide
  Seed: HIHIFSFTGEEMATK
HIHIFSATFEESATK

SEQ ID NO: 279710 - protein, 15 aa, Artificial Sequence
  Description of Artificial Sequence: Synthetic peptide
  Seed: HIHIFSFTGEEMATK
HIHIFSATFEETATK

SEQ ID NO: 279711 - protein, 15 aa, Artificial Sequence
  Description of Artificial Sequence: Synthetic peptide
  Seed: HIHIFSFTGEEMATK
HIHIFSATFEEVATK

SEQ ID NO: 279712 - protein, 15 aa, Artificial Sequence
  Description of Artificial Sequence: Synthetic peptide
  Seed: HIHIFSFTGEEMATK
HIHIFSATFEEYATK

SEQ ID NO: 279713 - protein, 15 aa, Artificial Sequence
  Description of Artificial Sequence: Synthetic peptide
  Seed: HIHIFSFTGEEMATK
HIHIFSATLEEIATK

SEQ ID NO: 279714 - protein, 15 aa, Artificial Sequence
  Description of Artificial Sequence: Synthetic peptide
  Seed: HIHIFSFTGEEMATK
HIHIFSATLEELATK

SEQ ID NO: 279715 - protein, 15 aa, Artificial Sequence
  Description of Artificial Sequence: Synthetic peptide
  Seed: HIHIFSFTGEEMATK
HIHIFSATLEEVATK

SEQ ID NO: 279716 - protein, 15 aa, Artificial Sequence
  Description of Artificial Sequence: Synthetic peptide
  Seed: HIHIFSFTGEEMATK
HIHIFSATSEEAATK

SEQ ID NO: 279717 - protein, 15 aa, Artificial Sequence
  Description of Artificial Sequence: Synthetic peptide
  Seed: HIHIFSFTGEEMATK
HIHIFSATSEEIATK

SEQ ID NO: 279718 - protein, 15 aa, Artificial Sequence
  Description of Artificial Sequence: Synthetic peptide
  Seed: HIHIFSFTGEEMATK
HIHIFSATSEELATK

SEQ ID NO: 279719 - protein, 15 aa, Artificial Sequence
  Description of Artificial Sequence: Synthetic peptide
  Seed: HIHIFSFTGEEMATK
HIHIFSATSEEVATK

SEQ ID NO: 279720 - protein, 15 aa, Artificial Sequence
  Description of Artificial Sequence: Synthetic peptide
  Seed: HIHIFSFTGEEMATK
HIHIFSATWEEFATK

SEQ ID NO: 279721 - protein, 15 aa, Artificial Sequence
  Description of Artificial Sequence: Synthetic peptide
  Seed: HIHIFSFTGEEMATK
HIHIFSATWEEIATK

SEQ ID NO: 279722 - protein, 15 aa, Artificial Sequence
  Description of Artificial Sequence: Synthetic peptide
  Seed: HIHIFSFTGEEMATK
HIHIFSATWEELATK

SEQ ID NO: 279723 - protein, 15 aa, Artificial Sequence
  Description of Artificial Sequence: Synthetic peptide
  Seed: HIHIFSFTGEEMATK
HIHIFSATWEEMATK

SEQ ID NO: 279724 - protein, 15 aa, Artificial Sequence
  Description of Artificial Sequence: Synthetic peptide
  Seed: HIHIFSFTGEEMATK
HIHIFSATWEEVATK

SEQ ID NO: 279725 - protein, 15 aa, Artificial Sequence
  Description of Artificial Sequence: Synthetic peptide
  Seed: HIHIFSFTGEEMATK
HIHIFSATYEEFATK

SEQ ID NO: 279726 - protein, 15 aa, Artificial Sequence
  Description of Artificial Sequence: Synthetic peptide
  Seed: HIHIFSFTGEEMATK
HIHIFSATYEEIATK

SEQ ID NO: 279727 - protein, 15 aa, Artificial Sequence
  Description of Artificial Sequence: Synthetic peptide
  Seed: HIHIFSFTGEEMATK
HIHIFSATYEELATK

SEQ ID NO: 279728 - protein, 15 aa, Artificial Sequence
  Description of Artificial Sequence: Synthetic peptide
  Seed: HIHIFSFTGEEMATK
HIHIFSATYEEMATK

SEQ ID NO: 279729 - protein, 15 aa, Artificial Sequence
  Description of Artificial Sequence: Synthetic peptide
  Seed: HIHIFSFTGEEMATK
HIHIFSATYEEVATK

SEQ ID NO: 279730 - protein, 15 aa, Artificial Sequence
  Description of Artificial Sequence: Synthetic peptide
  Seed: HIHIFSFTGEEMATK
HIHIFSCTFEEFATK

SEQ ID NO: 279731 - protein, 15 aa, Artificial Sequence
  Description of Artificial Sequence: Synthetic peptide
  Seed: HIHIFSFTGEEMATK
HIHIFSCTFEEIATK

SEQ ID NO: 279732 - protein, 15 aa, Artificial Sequence
  Description of Artificial Sequence: Synthetic peptide
  Seed: HIHIFSFTGEEMATK
HIHIFSCTFEELATK

SEQ ID NO: 279733 - protein, 15 aa, Artificial Sequence
  Description of Artificial Sequence: Synthetic peptide
  Seed: HIHIFSFTGEEMATK
HIHIFSCTFEEMATK

SEQ ID NO: 279734 - protein, 15 aa, Artificial Sequence
  Description of Artificial Sequence: Synthetic peptide
  Seed: HIHIFSFTGEEMATK
HIHIFSCTFEEVATK

SEQ ID NO: 279735 - protein, 15 aa, Artificial Sequence
  Description of Artificial Sequence: Synthetic peptide
  Seed: HIHIFSFTGEEMATK
HIHIFSCTFEEYATK

SEQ ID NO: 279736 - protein, 15 aa, Artificial Sequence
  Description of Artificial Sequence: Synthetic peptide
  Seed: HIHIFSFTGEEMATK
HIHIFSDTFEEFATK

SEQ ID NO: 279737 - protein, 15 aa, Artificial Sequence
  Description of Artificial Sequence: Synthetic peptide
  Seed: HIHIFSFTGEEMATK
HIHIFSDTFEEIATK

SEQ ID NO: 279738 - protein, 15 aa, Artificial Sequence
  Description of Artificial Sequence: Synthetic peptide
  Seed: HIHIFSFTGEEMATK
HIHIFSDTFEELATK

SEQ ID NO: 279739 - protein, 15 aa, Artificial Sequence
  Description of Artificial Sequence: Synthetic peptide
  Seed: HIHIFSFTGEEMATK
HIHIFSDTFEEMATK

SEQ ID NO: 279740 - protein, 15 aa, Artificial Sequence
  Description of Artificial Sequence: Synthetic peptide
  Seed: HIHIFSFTGEEMATK
HIHIFSDTFEEVATK

SEQ ID NO: 279741 - protein, 15 aa, Artificial Sequence
  Description of Artificial Sequence: Synthetic peptide
  Seed: HIHIFSFTGEEMATK
HIHIFSETFEEAATK

SEQ ID NO: 279742 - protein, 15 aa, Artificial Sequence
  Description of Artificial Sequence: Synthetic peptide
  Seed: HIHIFSFTGEEMATK
HIHIFSETFEEEATK

SEQ ID NO: 279743 - protein, 15 aa, Artificial Sequence
  Description of Artificial Sequence: Synthetic peptide
  Seed: HIHIFSFTGEEMATK
HIHIFSETFEEFATK

SEQ ID NO: 279744 - protein, 15 aa, Artificial Sequence
  Description of Artificial Sequence: Synthetic peptide
  Seed: HIHIFSFTGEEMATK
HIHIFSETFEEIATK

SEQ ID NO: 279745 - protein, 15 aa, Artificial Sequence
  Description of Artificial Sequence: Synthetic peptide
  Seed: HIHIFSFTGEEMATK
HIHIFSETFEELATK

SEQ ID NO: 279746 - protein, 15 aa, Artificial Sequence
  Description of Artificial Sequence: Synthetic peptide
  Seed: HIHIFSFTGEEMATK
HIHIFSETFEEMATK

SEQ ID NO: 279747 - protein, 15 aa, Artificial Sequence
  Description of Artificial Sequence: Synthetic peptide
  Seed: HIHIFSFTGEEMATK
HIHIFSETFEESATK

SEQ ID NO: 279748 - protein, 15 aa, Artificial Sequence
  Description of Artificial Sequence: Synthetic peptide
  Seed: HIHIFSFTGEEMATK
HIHIFSETFEETATK

SEQ ID NO: 279749 - protein, 15 aa, Artificial Sequence
  Description of Artificial Sequence: Synthetic peptide
  Seed: HIHIFSFTGEEMATK
HIHIFSETFEEVATK

SEQ ID NO: 279750 - protein, 15 aa, Artificial Sequence
  Description of Artificial Sequence: Synthetic peptide
  Seed: HIHIFSFTGEEMATK
HIHIFSETFEEWATK

SEQ ID NO: 279751 - protein, 15 aa, Artificial Sequence
  Description of Artificial Sequence: Synthetic peptide
  Seed: HIHIFSFTGEEMATK
HIHIFSETFEEYATK

SEQ ID NO: 279752 - protein, 15 aa, Artificial Sequence
  Description of Artificial Sequence: Synthetic peptide
  Seed: HIHIFSFTGEEMATK
HIHIFSETLEEIATK

SEQ ID NO: 279753 - protein, 15 aa, Artificial Sequence
  Description of Artificial Sequence: Synthetic peptide
  Seed: HIHIFSFTGEEMATK
HIHIFSETLEELATK

SEQ ID NO: 279754 - protein, 15 aa, Artificial Sequence
  Description of Artificial Sequence: Synthetic peptide
  Seed: HIHIFSFTGEEMATK
HIHIFSETWEEFATK

SEQ ID NO: 279755 - protein, 15 aa, Artificial Sequence
  Description of Artificial Sequence: Synthetic peptide
  Seed: HIHIFSFTGEEMATK
HIHIFSETWEEIATK

SEQ ID NO: 279756 - protein, 15 aa, Artificial Sequence
  Description of Artificial Sequence: Synthetic peptide
  Seed: HIHIFSFTGEEMATK
HIHIFSETWEELATK

SEQ ID NO: 279757 - protein, 15 aa, Artificial Sequence
  Description of Artificial Sequence: Synthetic peptide
  Seed: HIHIFSFTGEEMATK
HIHIFSETWEEVATK

SEQ ID NO: 279758 - protein, 15 aa, Artificial Sequence
  Description of Artificial Sequence: Synthetic peptide
  Seed: HIHIFSFTGEEMATK
HIHIFSETYEEFATK

SEQ ID NO: 279759 - protein, 15 aa, Artificial Sequence
  Description of Artificial Sequence: Synthetic peptide
  Seed: HIHIFSFTGEEMATK
HIHIFSETYEEIATK

SEQ ID NO: 279760 - protein, 15 aa, Artificial Sequence
  Description of Artificial Sequence: Synthetic peptide
  Seed: HIHIFSFTGEEMATK
HIHIFSETYEELATK

SEQ ID NO: 279761 - protein, 15 aa, Artificial Sequence
  Description of Artificial Sequence: Synthetic peptide
  Seed: HIHIFSFTGEEMATK
HIHIFSETYEEVATK

SEQ ID NO: 279762 - protein, 15 aa, Artificial Sequence
  Description of Artificial Sequence: Synthetic peptide
  Seed: HIHIFSFTGEEMATK
HIHIFSFTAEEFATK

SEQ ID NO: 279763 - protein, 15 aa, Artificial Sequence
  Description of Artificial Sequence: Synthetic peptide
  Seed: HIHIFSFTGEEMATK
HIHIFSFTFEEAATK

SEQ ID NO: 279764 - protein, 15 aa, Artificial Sequence
  Description of Artificial Sequence: Synthetic peptide
  Seed: HIHIFSFTGEEMATK
HIHIFSFTFEEDATK

SEQ ID NO: 279765 - protein, 15 aa, Artificial Sequence
  Description of Artificial Sequence: Synthetic peptide
  Seed: HIHIFSFTGEEMATK
HIHIFSFTFEEEATK

SEQ ID NO: 279766 - protein, 15 aa, Artificial Sequence
  Description of Artificial Sequence: Synthetic peptide
  Seed: HIHIFSFTGEEMATK
HIHIFSFTFEEFATK

SEQ ID NO: 279767 - protein, 15 aa, Artificial Sequence
  Description of Artificial Sequence: Synthetic peptide
  Seed: HIHIFSFTGEEMATK
HIHIFSFTFEEHATK

SEQ ID NO: 279768 - protein, 15 aa, Artificial Sequence
  Description of Artificial Sequence: Synthetic peptide
  Seed: HIHIFSFTGEEMATK
HIHIFSFTFEEIATK

SEQ ID NO: 279769 - protein, 15 aa, Artificial Sequence
  Description of Artificial Sequence: Synthetic peptide
  Seed: HIHIFSFTGEEMATK
HIHIFSFTFEEKATK

SEQ ID NO: 279770 - protein, 15 aa, Artificial Sequence
  Description of Artificial Sequence: Synthetic peptide
  Seed: HIHIFSFTGEEMATK
HIHIFSFTFEELATK

SEQ ID NO: 279771 - protein, 15 aa, Artificial Sequence
  Description of Artificial Sequence: Synthetic peptide
  Seed: HIHIFSFTGEEMATK
HIHIFSFTFEEMATK

SEQ ID NO: 279772 - protein, 15 aa, Artificial Sequence
  Description of Artificial Sequence: Synthetic peptide
  Seed: HIHIFSFTGEEMATK
HIHIFSFTFEENATK

SEQ ID NO: 279773 - protein, 15 aa, Artificial Sequence
  Description of Artificial Sequence: Synthetic peptide
  Seed: HIHIFSFTGEEMATK
HIHIFSFTFEEPATK

SEQ ID NO: 279774 - protein, 15 aa, Artificial Sequence
  Description of Artificial Sequence: Synthetic peptide
  Seed: HIHIFSFTGEEMATK
HIHIFSFTFEEQATK

SEQ ID NO: 279775 - protein, 15 aa, Artificial Sequence
  Description of Artificial Sequence: Synthetic peptide
  Seed: HIHIFSFTGEEMATK
HIHIFSFTFEERATK

SEQ ID NO: 279776 - protein, 15 aa, Artificial Sequence
  Description of Artificial Sequence: Synthetic peptide
  Seed: HIHIFSFTGEEMATK
HIHIFSFTFEESATK

SEQ ID NO: 279777 - protein, 15 aa, Artificial Sequence
  Description of Artificial Sequence: Synthetic peptide
  Seed: HIHIFSFTGEEMATK
HIHIFSFTFEETATK

SEQ ID NO: 279778 - protein, 15 aa, Artificial Sequence
  Description of Artificial Sequence: Synthetic peptide
  Seed: HIHIFSFTGEEMATK
HIHIFSFTFEEVATK

SEQ ID NO: 279779 - protein, 15 aa, Artificial Sequence
  Description of Artificial Sequence: Synthetic peptide
  Seed: HIHIFSFTGEEMATK
HIHIFSFTFEEYATK

SEQ ID NO: 279780 - protein, 15 aa, Artificial Sequence
  Description of Artificial Sequence: Synthetic peptide
  Seed: HIHIFSFTGEEMATK
HIHIFSFTIEEFATK

SEQ ID NO: 279781 - protein, 15 aa, Artificial Sequence
  Description of Artificial Sequence: Synthetic peptide
  Seed: HIHIFSFTGEEMATK
HIHIFSFTIEEIATK

SEQ ID NO: 279782 - protein, 15 aa, Artificial Sequence
  Description of Artificial Sequence: Synthetic peptide
  Seed: HIHIFSFTGEEMATK
HIHIFSFTIEELATK

SEQ ID NO: 279783 - protein, 15 aa, Artificial Sequence
  Description of Artificial Sequence: Synthetic peptide
  Seed: HIHIFSFTGEEMATK
HIHIFSFTIEEMATK

SEQ ID NO: 279784 - protein, 15 aa, Artificial Sequence
  Description of Artificial Sequence: Synthetic peptide
  Seed: HIHIFSFTGEEMATK
HIHIFSFTIEEVATK

SEQ ID NO: 279785 - protein, 15 aa, Artificial Sequence
  Description of Artificial Sequence: Synthetic peptide
  Seed: HIHIFSFTGEEMATK
HIHIFSFTIEEYATK

SEQ ID NO: 279786 - protein, 15 aa, Artificial Sequence
  Description of Artificial Sequence: Synthetic peptide
  Seed: HIHIFSFTGEEMATK
HIHIFSFTLEEAATK

SEQ ID NO: 279787 - protein, 15 aa, Artificial Sequence
  Description of Artificial Sequence: Synthetic peptide
  Seed: HIHIFSFTGEEMATK
HIHIFSFTLEEFATK

SEQ ID NO: 279788 - protein, 15 aa, Artificial Sequence
  Description of Artificial Sequence: Synthetic peptide
  Seed: HIHIFSFTGEEMATK
HIHIFSFTLEEIATK

SEQ ID NO: 279789 - protein, 15 aa, Artificial Sequence
  Description of Artificial Sequence: Synthetic peptide
  Seed: HIHIFSFTGEEMATK
HIHIFSFTLEELATK

SEQ ID NO: 279790 - protein, 15 aa, Artificial Sequence
  Description of Artificial Sequence: Synthetic peptide
  Seed: HIHIFSFTGEEMATK
HIHIFSFTLEEMATK

SEQ ID NO: 279791 - protein, 15 aa, Artificial Sequence
  Description of Artificial Sequence: Synthetic peptide
  Seed: HIHIFSFTGEEMATK
HIHIFSFTLEERATK

SEQ ID NO: 279792 - protein, 15 aa, Artificial Sequence
  Description of Artificial Sequence: Synthetic peptide
  Seed: HIHIFSFTGEEMATK
HIHIFSFTLEETATK

SEQ ID NO: 279793 - protein, 15 aa, Artificial Sequence
  Description of Artificial Sequence: Synthetic peptide
  Seed: HIHIFSFTGEEMATK
HIHIFSFTLEEVATK

SEQ ID NO: 279794 - protein, 15 aa, Artificial Sequence
  Description of Artificial Sequence: Synthetic peptide
  Seed: HIHIFSFTGEEMATK
HIHIFSFTLEEYATK

SEQ ID NO: 279795 - protein, 15 aa, Artificial Sequence
  Description of Artificial Sequence: Synthetic peptide
  Seed: HIHIFSFTGEEMATK
HIHIFSFTMEEFATK

SEQ ID NO: 279796 - protein, 15 aa, Artificial Sequence
  Description of Artificial Sequence: Synthetic peptide
  Seed: HIHIFSFTGEEMATK
HIHIFSFTMEEIATK

SEQ ID NO: 279797 - protein, 15 aa, Artificial Sequence
  Description of Artificial Sequence: Synthetic peptide
  Seed: HIHIFSFTGEEMATK
HIHIFSFTMEELATK

SEQ ID NO: 279798 - protein, 15 aa, Artificial Sequence
  Description of Artificial Sequence: Synthetic peptide
  Seed: HIHIFSFTGEEMATK
HIHIFSFTMEEMATK

SEQ ID NO: 279799 - protein, 15 aa, Artificial Sequence
  Description of Artificial Sequence: Synthetic peptide
  Seed: HIHIFSFTGEEMATK
HIHIFSFTMEEVATK

SEQ ID NO: 279800 - protein, 15 aa, Artificial Sequence
  Description of Artificial Sequence: Synthetic peptide
  Seed: HIHIFSFTGEEMATK
HIHIFSFTMEEYATK

SEQ ID NO: 279801 - protein, 15 aa, Artificial Sequence
  Description of Artificial Sequence: Synthetic peptide
  Seed: HIHIFSFTGEEMATK
HIHIFSFTNEEIATK

SEQ ID NO: 279802 - protein, 15 aa, Artificial Sequence
  Description of Artificial Sequence: Synthetic peptide
  Seed: HIHIFSFTGEEMATK
HIHIFSFTNEELATK

SEQ ID NO: 279803 - protein, 15 aa, Artificial Sequence
  Description of Artificial Sequence: Synthetic peptide
  Seed: HIHIFSFTGEEMATK
HIHIFSFTNEEVATK

SEQ ID NO: 279804 - protein, 15 aa, Artificial Sequence
  Description of Artificial Sequence: Synthetic peptide
  Seed: HIHIFSFTGEEMATK
HIHIFSFTSEEIATK

SEQ ID NO: 279805 - protein, 15 aa, Artificial Sequence
  Description of Artificial Sequence: Synthetic peptide
  Seed: HIHIFSFTGEEMATK
HIHIFSFTSEELATK

SEQ ID NO: 279806 - protein, 15 aa, Artificial Sequence
  Description of Artificial Sequence: Synthetic peptide
  Seed: HIHIFSFTGEEMATK
HIHIFSFTSEEVATK

SEQ ID NO: 279807 - protein, 15 aa, Artificial Sequence
  Description of Artificial Sequence: Synthetic peptide
  Seed: HIHIFSFTGEEMATK
HIHIFSFTVEEFATK

SEQ ID NO: 279808 - protein, 15 aa, Artificial Sequence
  Description of Artificial Sequence: Synthetic peptide
  Seed: HIHIFSFTGEEMATK
HIHIFSFTVEEIATK

SEQ ID NO: 279809 - protein, 15 aa, Artificial Sequence
  Description of Artificial Sequence: Synthetic peptide
  Seed: HIHIFSFTGEEMATK
HIHIFSFTVEELATK

SEQ ID NO: 279810 - protein, 15 aa, Artificial Sequence
  Description of Artificial Sequence: Synthetic peptide
  Seed: HIHIFSFTGEEMATK
HIHIFSFTVEEVATK

SEQ ID NO: 279811 - protein, 15 aa, Artificial Sequence
  Description of Artificial Sequence: Synthetic peptide
  Seed: HIHIFSFTGEEMATK
HIHIFSFTWEEAATK

SEQ ID NO: 279812 - protein, 15 aa, Artificial Sequence
  Description of Artificial Sequence: Synthetic peptide
  Seed: HIHIFSFTGEEMATK
HIHIFSFTWEEFATK

SEQ ID NO: 279813 - protein, 15 aa, Artificial Sequence
  Description of Artificial Sequence: Synthetic peptide
  Seed: HIHIFSFTGEEMATK
HIHIFSFTWEEIATK

SEQ ID NO: 279814 - protein, 15 aa, Artificial Sequence
  Description of Artificial Sequence: Synthetic peptide
  Seed: HIHIFSFTGEEMATK
HIHIFSFTWEELATK

SEQ ID NO: 279815 - protein, 15 aa, Artificial Sequence
  Description of Artificial Sequence: Synthetic peptide
  Seed: HIHIFSFTGEEMATK
HIHIFSFTWEEMATK

SEQ ID NO: 279816 - protein, 15 aa, Artificial Sequence
  Description of Artificial Sequence: Synthetic peptide
  Seed: HIHIFSFTGEEMATK
HIHIFSFTWEETATK

SEQ ID NO: 279817 - protein, 15 aa, Artificial Sequence
  Description of Artificial Sequence: Synthetic peptide
  Seed: HIHIFSFTGEEMATK
HIHIFSFTWEEVATK

SEQ ID NO: 279818 - protein, 15 aa, Artificial Sequence
  Description of Artificial Sequence: Synthetic peptide
  Seed: HIHIFSFTGEEMATK
HIHIFSFTWEEYATK

SEQ ID NO: 279819 - protein, 15 aa, Artificial Sequence
  Description of Artificial Sequence: Synthetic peptide
  Seed: HIHIFSFTGEEMATK
HIHIFSFTYEEAATK

SEQ ID NO: 279820 - protein, 15 aa, Artificial Sequence
  Description of Artificial Sequence: Synthetic peptide
  Seed: HIHIFSFTGEEMATK
HIHIFSFTYEEFATK

SEQ ID NO: 279821 - protein, 15 aa, Artificial Sequence
  Description of Artificial Sequence: Synthetic peptide
  Seed: HIHIFSFTGEEMATK
HIHIFSFTYEEIATK

SEQ ID NO: 279822 - protein, 15 aa, Artificial Sequence
  Description of Artificial Sequence: Synthetic peptide
  Seed: HIHIFSFTGEEMATK
HIHIFSFTYEELATK

SEQ ID NO: 279823 - protein, 15 aa, Artificial Sequence
  Description of Artificial Sequence: Synthetic peptide
  Seed: HIHIFSFTGEEMATK
HIHIFSFTYEEMATK

SEQ ID NO: 279824 - protein, 15 aa, Artificial Sequence
  Description of Artificial Sequence: Synthetic peptide
  Seed: HIHIFSFTGEEMATK
HIHIFSFTYEETATK

SEQ ID NO: 279825 - protein, 15 aa, Artificial Sequence
  Description of Artificial Sequence: Synthetic peptide
  Seed: HIHIFSFTGEEMATK
HIHIFSFTYEEVATK

SEQ ID NO: 279826 - protein, 15 aa, Artificial Sequence
  Description of Artificial Sequence: Synthetic peptide
  Seed: HIHIFSFTGEEMATK
HIHIFSFTYEEYATK

SEQ ID NO: 279827 - protein, 15 aa, Artificial Sequence
  Description of Artificial Sequence: Synthetic peptide
  Seed: HIHIFSFTGEEMATK
HIHIFSGTAEEAATK

SEQ ID NO: 279828 - protein, 15 aa, Artificial Sequence
  Description of Artificial Sequence: Synthetic peptide
  Seed: HIHIFSFTGEEMATK
HIHIFSGTAEESATK

SEQ ID NO: 279829 - protein, 15 aa, Artificial Sequence
  Description of Artificial Sequence: Synthetic peptide
  Seed: HIHIFSFTGEEMATK
HIHIFSGTAEEVATK

SEQ ID NO: 279830 - protein, 15 aa, Artificial Sequence
  Description of Artificial Sequence: Synthetic peptide
  Seed: HIHIFSFTGEEMATK
HIHIFSGTFEEIATK

SEQ ID NO: 279831 - protein, 15 aa, Artificial Sequence
  Description of Artificial Sequence: Synthetic peptide
  Seed: HIHIFSFTGEEMATK
HIHIFSGTFEELATK

SEQ ID NO: 279832 - protein, 15 aa, Artificial Sequence
  Description of Artificial Sequence: Synthetic peptide
  Seed: HIHIFSFTGEEMATK
HIHIFSGTFEEVATK

SEQ ID NO: 279833 - protein, 15 aa, Artificial Sequence
  Description of Artificial Sequence: Synthetic peptide
  Seed: HIHIFSFTGEEMATK
HIHIFSGTVEEAATK

SEQ ID NO: 279834 - protein, 15 aa, Artificial Sequence
  Description of Artificial Sequence: Synthetic peptide
  Seed: HIHIFSFTGEEMATK
HIHIFSHTFEEAATK

SEQ ID NO: 279835 - protein, 15 aa, Artificial Sequence
  Description of Artificial Sequence: Synthetic peptide
  Seed: HIHIFSFTGEEMATK
HIHIFSHTFEEDATK

SEQ ID NO: 279836 - protein, 15 aa, Artificial Sequence
  Description of Artificial Sequence: Synthetic peptide
  Seed: HIHIFSFTGEEMATK
HIHIFSHTFEEEATK

SEQ ID NO: 279837 - protein, 15 aa, Artificial Sequence
  Description of Artificial Sequence: Synthetic peptide
  Seed: HIHIFSFTGEEMATK
HIHIFSHTFEEFATK

SEQ ID NO: 279838 - protein, 15 aa, Artificial Sequence
  Description of Artificial Sequence: Synthetic peptide
  Seed: HIHIFSFTGEEMATK
HIHIFSHTFEEHATK

SEQ ID NO: 279839 - protein, 15 aa, Artificial Sequence
  Description of Artificial Sequence: Synthetic peptide
  Seed: HIHIFSFTGEEMATK
HIHIFSHTFEEIATK

SEQ ID NO: 279840 - protein, 15 aa, Artificial Sequence
  Description of Artificial Sequence: Synthetic peptide
  Seed: HIHIFSFTGEEMATK
HIHIFSHTFEELATK

SEQ ID NO: 279841 - protein, 15 aa, Artificial Sequence
  Description of Artificial Sequence: Synthetic peptide
  Seed: HIHIFSFTGEEMATK
HIHIFSHTFEEMATK

SEQ ID NO: 279842 - protein, 15 aa, Artificial Sequence
  Description of Artificial Sequence: Synthetic peptide
  Seed: HIHIFSFTGEEMATK
HIHIFSHTFEENATK

SEQ ID NO: 279843 - protein, 15 aa, Artificial Sequence
  Description of Artificial Sequence: Synthetic peptide
  Seed: HIHIFSFTGEEMATK
HIHIFSHTFEEQATK

SEQ ID NO: 279844 - protein, 15 aa, Artificial Sequence
  Description of Artificial Sequence: Synthetic peptide
  Seed: HIHIFSFTGEEMATK
HIHIFSHTFEESATK

SEQ ID NO: 279845 - protein, 15 aa, Artificial Sequence
  Description of Artificial Sequence: Synthetic peptide
  Seed: HIHIFSFTGEEMATK
HIHIFSHTFEETATK

SEQ ID NO: 279846 - protein, 15 aa, Artificial Sequence
  Description of Artificial Sequence: Synthetic peptide
  Seed: HIHIFSFTGEEMATK
HIHIFSHTFEEVATK

SEQ ID NO: 279847 - protein, 15 aa, Artificial Sequence
  Description of Artificial Sequence: Synthetic peptide
  Seed: HIHIFSFTGEEMATK
HIHIFSHTFEEWATK

SEQ ID NO: 279848 - protein, 15 aa, Artificial Sequence
  Description of Artificial Sequence: Synthetic peptide
  Seed: HIHIFSFTGEEMATK
HIHIFSHTFEEYATK

SEQ ID NO: 279849 - protein, 15 aa, Artificial Sequence
  Description of Artificial Sequence: Synthetic peptide
  Seed: HIHIFSFTGEEMATK
HIHIFSHTIEEIATK

SEQ ID NO: 279850 - protein, 15 aa, Artificial Sequence
  Description of Artificial Sequence: Synthetic peptide
  Seed: HIHIFSFTGEEMATK
HIHIFSHTIEELATK

SEQ ID NO: 279851 - protein, 15 aa, Artificial Sequence
  Description of Artificial Sequence: Synthetic peptide
  Seed: HIHIFSFTGEEMATK
HIHIFSHTLEEFATK

SEQ ID NO: 279852 - protein, 15 aa, Artificial Sequence
  Description of Artificial Sequence: Synthetic peptide
  Seed: HIHIFSFTGEEMATK
HIHIFSHTLEEIATK

SEQ ID NO: 279853 - protein, 15 aa, Artificial Sequence
  Description of Artificial Sequence: Synthetic peptide
  Seed: HIHIFSFTGEEMATK
HIHIFSHTLEELATK

SEQ ID NO: 279854 - protein, 15 aa, Artificial Sequence
  Description of Artificial Sequence: Synthetic peptide
  Seed: HIHIFSFTGEEMATK
HIHIFSHTLEEMATK

SEQ ID NO: 279855 - protein, 15 aa, Artificial Sequence
  Description of Artificial Sequence: Synthetic peptide
  Seed: HIHIFSFTGEEMATK
HIHIFSHTLEEVATK

SEQ ID NO: 279856 - protein, 15 aa, Artificial Sequence
  Description of Artificial Sequence: Synthetic peptide
  Seed: HIHIFSFTGEEMATK
HIHIFSHTMEEIATK

SEQ ID NO: 279857 - protein, 15 aa, Artificial Sequence
  Description of Artificial Sequence: Synthetic peptide
  Seed: HIHIFSFTGEEMATK
HIHIFSHTMEELATK

SEQ ID NO: 279858 - protein, 15 aa, Artificial Sequence
  Description of Artificial Sequence: Synthetic peptide
  Seed: HIHIFSFTGEEMATK
HIHIFSHTWEEFATK

SEQ ID NO: 279859 - protein, 15 aa, Artificial Sequence
  Description of Artificial Sequence: Synthetic peptide
  Seed: HIHIFSFTGEEMATK
HIHIFSHTWEEIATK

SEQ ID NO: 279860 - protein, 15 aa, Artificial Sequence
  Description of Artificial Sequence: Synthetic peptide
  Seed: HIHIFSFTGEEMATK
HIHIFSHTWEELATK

SEQ ID NO: 279861 - protein, 15 aa, Artificial Sequence
  Description of Artificial Sequence: Synthetic peptide
  Seed: HIHIFSFTGEEMATK
HIHIFSHTWEEMATK

SEQ ID NO: 279862 - protein, 15 aa, Artificial Sequence
  Description of Artificial Sequence: Synthetic peptide
  Seed: HIHIFSFTGEEMATK
HIHIFSHTWEEVATK

SEQ ID NO: 279863 - protein, 15 aa, Artificial Sequence
  Description of Artificial Sequence: Synthetic peptide
  Seed: HIHIFSFTGEEMATK
HIHIFSHTYEEFATK

SEQ ID NO: 279864 - protein, 15 aa, Artificial Sequence
  Description of Artificial Sequence: Synthetic peptide
  Seed: HIHIFSFTGEEMATK
HIHIFSHTYEEIATK

SEQ ID NO: 279865 - protein, 15 aa, Artificial Sequence
  Description of Artificial Sequence: Synthetic peptide
  Seed: HIHIFSFTGEEMATK
HIHIFSHTYEELATK

SEQ ID NO: 279866 - protein, 15 aa, Artificial Sequence
  Description of Artificial Sequence: Synthetic peptide
  Seed: HIHIFSFTGEEMATK
HIHIFSHTYEEMATK

SEQ ID NO: 279867 - protein, 15 aa, Artificial Sequence
  Description of Artificial Sequence: Synthetic peptide
  Seed: HIHIFSFTGEEMATK
HIHIFSHTYEEVATK

SEQ ID NO: 279868 - protein, 15 aa, Artificial Sequence
  Description of Artificial Sequence: Synthetic peptide
  Seed: HIHIFSFTGEEMATK
HIHIFSITAEEAATK

SEQ ID NO: 279869 - protein, 15 aa, Artificial Sequence
  Description of Artificial Sequence: Synthetic peptide
  Seed: HIHIFSFTGEEMATK
HIHIFSITAEEMATK

SEQ ID NO: 279870 - protein, 15 aa, Artificial Sequence
  Description of Artificial Sequence: Synthetic peptide
  Seed: HIHIFSFTGEEMATK
HIHIFSITAEENATK

SEQ ID NO: 279871 - protein, 15 aa, Artificial Sequence
  Description of Artificial Sequence: Synthetic peptide
  Seed: HIHIFSFTGEEMATK
HIHIFSITAEESATK

SEQ ID NO: 279872 - protein, 15 aa, Artificial Sequence
  Description of Artificial Sequence: Synthetic peptide
  Seed: HIHIFSFTGEEMATK
HIHIFSITAEETATK

SEQ ID NO: 279873 - protein, 15 aa, Artificial Sequence
  Description of Artificial Sequence: Synthetic peptide
  Seed: HIHIFSFTGEEMATK
HIHIFSITAEEVATK

SEQ ID NO: 279874 - protein, 15 aa, Artificial Sequence
  Description of Artificial Sequence: Synthetic peptide
  Seed: HIHIFSFTGEEMATK
HIHIFSITFEEAATK

SEQ ID NO: 279875 - protein, 15 aa, Artificial Sequence
  Description of Artificial Sequence: Synthetic peptide
  Seed: HIHIFSFTGEEMATK
HIHIFSITFEECATK

SEQ ID NO: 279876 - protein, 15 aa, Artificial Sequence
  Description of Artificial Sequence: Synthetic peptide
  Seed: HIHIFSFTGEEMATK
HIHIFSITFEEDATK

SEQ ID NO: 279877 - protein, 15 aa, Artificial Sequence
  Description of Artificial Sequence: Synthetic peptide
  Seed: HIHIFSFTGEEMATK
HIHIFSITFEEEATK

SEQ ID NO: 279878 - protein, 15 aa, Artificial Sequence
  Description of Artificial Sequence: Synthetic peptide
  Seed: HIHIFSFTGEEMATK
HIHIFSITFEEFATK

SEQ ID NO: 279879 - protein, 15 aa, Artificial Sequence
  Description of Artificial Sequence: Synthetic peptide
  Seed: HIHIFSFTGEEMATK
HIHIFSITFEEHATK

SEQ ID NO: 279880 - protein, 15 aa, Artificial Sequence
  Description of Artificial Sequence: Synthetic peptide
  Seed: HIHIFSFTGEEMATK
HIHIFSITFEEIATK

SEQ ID NO: 279881 - protein, 15 aa, Artificial Sequence
  Description of Artificial Sequence: Synthetic peptide
  Seed: HIHIFSFTGEEMATK
HIHIFSITFEEKATK

SEQ ID NO: 279882 - protein, 15 aa, Artificial Sequence
  Description of Artificial Sequence: Synthetic peptide
  Seed: HIHIFSFTGEEMATK
HIHIFSITFEELATK

SEQ ID NO: 279883 - protein, 15 aa, Artificial Sequence
  Description of Artificial Sequence: Synthetic peptide
  Seed: HIHIFSFTGEEMATK
HIHIFSITFEEMATK

SEQ ID NO: 279884 - protein, 15 aa, Artificial Sequence
  Description of Artificial Sequence: Synthetic peptide
  Seed: HIHIFSFTGEEMATK
HIHIFSITFEENATK

SEQ ID NO: 279885 - protein, 15 aa, Artificial Sequence
  Description of Artificial Sequence: Synthetic peptide
  Seed: HIHIFSFTGEEMATK
HIHIFSITFEEPATK

SEQ ID NO: 279886 - protein, 15 aa, Artificial Sequence
  Description of Artificial Sequence: Synthetic peptide
  Seed: HIHIFSFTGEEMATK
HIHIFSITFEEQATK

SEQ ID NO: 279887 - protein, 15 aa, Artificial Sequence
  Description of Artificial Sequence: Synthetic peptide
  Seed: HIHIFSFTGEEMATK
HIHIFSITFEERATK

SEQ ID NO: 279888 - protein, 15 aa, Artificial Sequence
  Description of Artificial Sequence: Synthetic peptide
  Seed: HIHIFSFTGEEMATK
HIHIFSITFEESATK

SEQ ID NO: 279889 - protein, 15 aa, Artificial Sequence
  Description of Artificial Sequence: Synthetic peptide
  Seed: HIHIFSFTGEEMATK
HIHIFSITFEETATK

SEQ ID NO: 279890 - protein, 15 aa, Artificial Sequence
  Description of Artificial Sequence: Synthetic peptide
  Seed: HIHIFSFTGEEMATK
HIHIFSITFEEVATK

SEQ ID NO: 279891 - protein, 15 aa, Artificial Sequence
  Description of Artificial Sequence: Synthetic peptide
  Seed: HIHIFSFTGEEMATK
HIHIFSITFEEWATK

SEQ ID NO: 279892 - protein, 15 aa, Artificial Sequence
  Description of Artificial Sequence: Synthetic peptide
  Seed: HIHIFSFTGEEMATK
HIHIFSITFEEYATK

SEQ ID NO: 279893 - protein, 15 aa, Artificial Sequence
  Description of Artificial Sequence: Synthetic peptide
  Seed: HIHIFSFTGEEMATK
HIHIFSITIEEFATK

SEQ ID NO: 279894 - protein, 15 aa, Artificial Sequence
  Description of Artificial Sequence: Synthetic peptide
  Seed: HIHIFSFTGEEMATK
HIHIFSITIEEIATK

SEQ ID NO: 279895 - protein, 15 aa, Artificial Sequence
  Description of Artificial Sequence: Synthetic peptide
  Seed: HIHIFSFTGEEMATK
HIHIFSITIEELATK

SEQ ID NO: 279896 - protein, 15 aa, Artificial Sequence
  Description of Artificial Sequence: Synthetic peptide
  Seed: HIHIFSFTGEEMATK
HIHIFSITIEEVATK

SEQ ID NO: 279897 - protein, 15 aa, Artificial Sequence
  Description of Artificial Sequence: Synthetic peptide
  Seed: HIHIFSFTGEEMATK
HIHIFSITLEEFATK

SEQ ID NO: 279898 - protein, 15 aa, Artificial Sequence
  Description of Artificial Sequence: Synthetic peptide
  Seed: HIHIFSFTGEEMATK
HIHIFSITLEEIATK

SEQ ID NO: 279899 - protein, 15 aa, Artificial Sequence
  Description of Artificial Sequence: Synthetic peptide
  Seed: HIHIFSFTGEEMATK
HIHIFSITLEELATK

SEQ ID NO: 279900 - protein, 15 aa, Artificial Sequence
  Description of Artificial Sequence: Synthetic peptide
  Seed: HIHIFSFTGEEMATK
HIHIFSITLEEMATK

SEQ ID NO: 279901 - protein, 15 aa, Artificial Sequence
  Description of Artificial Sequence: Synthetic peptide
  Seed: HIHIFSFTGEEMATK
HIHIFSITLEEVATK

SEQ ID NO: 279902 - protein, 15 aa, Artificial Sequence
  Description of Artificial Sequence: Synthetic peptide
  Seed: HIHIFSFTGEEMATK
HIHIFSITLEEYATK

SEQ ID NO: 279903 - protein, 15 aa, Artificial Sequence
  Description of Artificial Sequence: Synthetic peptide
  Seed: HIHIFSFTGEEMATK
HIHIFSITMEEFATK

SEQ ID NO: 279904 - protein, 15 aa, Artificial Sequence
  Description of Artificial Sequence: Synthetic peptide
  Seed: HIHIFSFTGEEMATK
HIHIFSITMEEIATK

SEQ ID NO: 279905 - protein, 15 aa, Artificial Sequence
  Description of Artificial Sequence: Synthetic peptide
  Seed: HIHIFSFTGEEMATK
HIHIFSITMEELATK

SEQ ID NO: 279906 - protein, 15 aa, Artificial Sequence
  Description of Artificial Sequence: Synthetic peptide
  Seed: HIHIFSFTGEEMATK
HIHIFSITMEEMATK

SEQ ID NO: 279907 - protein, 15 aa, Artificial Sequence
  Description of Artificial Sequence: Synthetic peptide
  Seed: HIHIFSFTGEEMATK
HIHIFSITMEEVATK

SEQ ID NO: 279908 - protein, 15 aa, Artificial Sequence
  Description of Artificial Sequence: Synthetic peptide
  Seed: HIHIFSFTGEEMATK
HIHIFSITPEEAATK

SEQ ID NO: 279909 - protein, 15 aa, Artificial Sequence
  Description of Artificial Sequence: Synthetic peptide
  Seed: HIHIFSFTGEEMATK
HIHIFSITPEELATK

SEQ ID NO: 279910 - protein, 15 aa, Artificial Sequence
  Description of Artificial Sequence: Synthetic peptide
  Seed: HIHIFSFTGEEMATK
HIHIFSITPEEVATK

SEQ ID NO: 279911 - protein, 15 aa, Artificial Sequence
  Description of Artificial Sequence: Synthetic peptide
  Seed: HIHIFSFTGEEMATK
HIHIFSITSEEAATK

SEQ ID NO: 279912 - protein, 15 aa, Artificial Sequence
  Description of Artificial Sequence: Synthetic peptide
  Seed: HIHIFSFTGEEMATK
HIHIFSITSEEIATK

SEQ ID NO: 279913 - protein, 15 aa, Artificial Sequence
  Description of Artificial Sequence: Synthetic peptide
  Seed: HIHIFSFTGEEMATK
HIHIFSITSEELATK

SEQ ID NO: 279914 - protein, 15 aa, Artificial Sequence
  Description of Artificial Sequence: Synthetic peptide
  Seed: HIHIFSFTGEEMATK
HIHIFSITSEEVATK

SEQ ID NO: 279915 - protein, 15 aa, Artificial Sequence
  Description of Artificial Sequence: Synthetic peptide
  Seed: HIHIFSFTGEEMATK
HIHIFSITWEEAATK

SEQ ID NO: 279916 - protein, 15 aa, Artificial Sequence
  Description of Artificial Sequence: Synthetic peptide
  Seed: HIHIFSFTGEEMATK
HIHIFSITWEEFATK

SEQ ID NO: 279917 - protein, 15 aa, Artificial Sequence
  Description of Artificial Sequence: Synthetic peptide
  Seed: HIHIFSFTGEEMATK
HIHIFSITWEEIATK

SEQ ID NO: 279918 - protein, 15 aa, Artificial Sequence
  Description of Artificial Sequence: Synthetic peptide
  Seed: HIHIFSFTGEEMATK
HIHIFSITWEELATK

SEQ ID NO: 279919 - protein, 15 aa, Artificial Sequence
  Description of Artificial Sequence: Synthetic peptide
  Seed: HIHIFSFTGEEMATK
HIHIFSITWEEMATK

SEQ ID NO: 279920 - protein, 15 aa, Artificial Sequence
  Description of Artificial Sequence: Synthetic peptide
  Seed: HIHIFSFTGEEMATK
HIHIFSITWEETATK

SEQ ID NO: 279921 - protein, 15 aa, Artificial Sequence
  Description of Artificial Sequence: Synthetic peptide
  Seed: HIHIFSFTGEEMATK
HIHIFSITWEEVATK

SEQ ID NO: 279922 - protein, 15 aa, Artificial Sequence
  Description of Artificial Sequence: Synthetic peptide
  Seed: HIHIFSFTGEEMATK
HIHIFSITWEEYATK

SEQ ID NO: 279923 - protein, 15 aa, Artificial Sequence
  Description of Artificial Sequence: Synthetic peptide
  Seed: HIHIFSFTGEEMATK
HIHIFSITYEEAATK

SEQ ID NO: 279924 - protein, 15 aa, Artificial Sequence
  Description of Artificial Sequence: Synthetic peptide
  Seed: HIHIFSFTGEEMATK
HIHIFSITYEEFATK

SEQ ID NO: 279925 - protein, 15 aa, Artificial Sequence
  Description of Artificial Sequence: Synthetic peptide
  Seed: HIHIFSFTGEEMATK
HIHIFSITYEEIATK

SEQ ID NO: 279926 - protein, 15 aa, Artificial Sequence
  Description of Artificial Sequence: Synthetic peptide
  Seed: HIHIFSFTGEEMATK
HIHIFSITYEELATK

SEQ ID NO: 279927 - protein, 15 aa, Artificial Sequence
  Description of Artificial Sequence: Synthetic peptide
  Seed: HIHIFSFTGEEMATK
HIHIFSITYEEMATK

SEQ ID NO: 279928 - protein, 15 aa, Artificial Sequence
  Description of Artificial Sequence: Synthetic peptide
  Seed: HIHIFSFTGEEMATK
HIHIFSITYEETATK

SEQ ID NO: 279929 - protein, 15 aa, Artificial Sequence
  Description of Artificial Sequence: Synthetic peptide
  Seed: HIHIFSFTGEEMATK
HIHIFSITYEEVATK

SEQ ID NO: 279930 - protein, 15 aa, Artificial Sequence
  Description of Artificial Sequence: Synthetic peptide
  Seed: HIHIFSFTGEEMATK
HIHIFSITYEEYATK

SEQ ID NO: 279931 - protein, 15 aa, Artificial Sequence
  Description of Artificial Sequence: Synthetic peptide
  Seed: HIHIFSFTGEEMATK
HIHIFSKTFEEAATK

SEQ ID NO: 279932 - protein, 15 aa, Artificial Sequence
  Description of Artificial Sequence: Synthetic peptide
  Seed: HIHIFSFTGEEMATK
HIHIFSKTFEEFATK

SEQ ID NO: 279933 - protein, 15 aa, Artificial Sequence
  Description of Artificial Sequence: Synthetic peptide
  Seed: HIHIFSFTGEEMATK
HIHIFSKTFEEIATK

SEQ ID NO: 279934 - protein, 15 aa, Artificial Sequence
  Description of Artificial Sequence: Synthetic peptide
  Seed: HIHIFSFTGEEMATK
HIHIFSKTFEELATK

SEQ ID NO: 279935 - protein, 15 aa, Artificial Sequence
  Description of Artificial Sequence: Synthetic peptide
  Seed: HIHIFSFTGEEMATK
HIHIFSKTFEEMATK

SEQ ID NO: 279936 - protein, 15 aa, Artificial Sequence
  Description of Artificial Sequence: Synthetic peptide
  Seed: HIHIFSFTGEEMATK
HIHIFSKTFEETATK

SEQ ID NO: 279937 - protein, 15 aa, Artificial Sequence
  Description of Artificial Sequence: Synthetic peptide
  Seed: HIHIFSFTGEEMATK
HIHIFSKTFEEVATK

SEQ ID NO: 279938 - protein, 15 aa, Artificial Sequence
  Description of Artificial Sequence: Synthetic peptide
  Seed: HIHIFSFTGEEMATK
HIHIFSKTLEELATK

SEQ ID NO: 279939 - protein, 15 aa, Artificial Sequence
  Description of Artificial Sequence: Synthetic peptide
  Seed: HIHIFSFTGEEMATK
HIHIFSKTWEEIATK

SEQ ID NO: 279940 - protein, 15 aa, Artificial Sequence
  Description of Artificial Sequence: Synthetic peptide
  Seed: HIHIFSFTGEEMATK
HIHIFSKTWEELATK

SEQ ID NO: 279941 - protein, 15 aa, Artificial Sequence
  Description of Artificial Sequence: Synthetic peptide
  Seed: HIHIFSFTGEEMATK
HIHIFSKTYEEIATK

SEQ ID NO: 279942 - protein, 15 aa, Artificial Sequence
  Description of Artificial Sequence: Synthetic peptide
  Seed: HIHIFSFTGEEMATK
HIHIFSKTYEELATK

SEQ ID NO: 279943 - protein, 15 aa, Artificial Sequence
  Description of Artificial Sequence: Synthetic peptide
  Seed: HIHIFSFTGEEMATK
HIHIFSKTYEEVATK

SEQ ID NO: 279944 - protein, 15 aa, Artificial Sequence
  Description of Artificial Sequence: Synthetic peptide
  Seed: HIHIFSFTGEEMATK
HIHIFSLTAEEAATK

SEQ ID NO: 279945 - protein, 15 aa, Artificial Sequence
  Description of Artificial Sequence: Synthetic peptide
  Seed: HIHIFSFTGEEMATK
HIHIFSLTAEEGATK

SEQ ID NO: 279946 - protein, 15 aa, Artificial Sequence
  Description of Artificial Sequence: Synthetic peptide
  Seed: HIHIFSFTGEEMATK
HIHIFSLTAEEHATK

SEQ ID NO: 279947 - protein, 15 aa, Artificial Sequence
  Description of Artificial Sequence: Synthetic peptide
  Seed: HIHIFSFTGEEMATK
HIHIFSLTAEEIATK

SEQ ID NO: 279948 - protein, 15 aa, Artificial Sequence
  Description of Artificial Sequence: Synthetic peptide
  Seed: HIHIFSFTGEEMATK
HIHIFSLTAEELATK

SEQ ID NO: 279949 - protein, 15 aa, Artificial Sequence
  Description of Artificial Sequence: Synthetic peptide
  Seed: HIHIFSFTGEEMATK
HIHIFSLTAEEMATK

SEQ ID NO: 279950 - protein, 15 aa, Artificial Sequence
  Description of Artificial Sequence: Synthetic peptide
  Seed: HIHIFSFTGEEMATK
HIHIFSLTAEENATK

SEQ ID NO: 279951 - protein, 15 aa, Artificial Sequence
  Description of Artificial Sequence: Synthetic peptide
  Seed: HIHIFSFTGEEMATK
HIHIFSLTAEESATK

SEQ ID NO: 279952 - protein, 15 aa, Artificial Sequence
  Description of Artificial Sequence: Synthetic peptide
  Seed: HIHIFSFTGEEMATK
HIHIFSLTAEETATK

SEQ ID NO: 279953 - protein, 15 aa, Artificial Sequence
  Description of Artificial Sequence: Synthetic peptide
  Seed: HIHIFSFTGEEMATK
HIHIFSLTAEEVATK

SEQ ID NO: 279954 - protein, 15 aa, Artificial Sequence
  Description of Artificial Sequence: Synthetic peptide
  Seed: HIHIFSFTGEEMATK
HIHIFSLTFEEAATK

SEQ ID NO: 279955 - protein, 15 aa, Artificial Sequence
  Description of Artificial Sequence: Synthetic peptide
  Seed: HIHIFSFTGEEMATK
HIHIFSLTFEEDATK

SEQ ID NO: 279956 - protein, 15 aa, Artificial Sequence
  Description of Artificial Sequence: Synthetic peptide
  Seed: HIHIFSFTGEEMATK
HIHIFSLTFEEEATK

SEQ ID NO: 279957 - protein, 15 aa, Artificial Sequence
  Description of Artificial Sequence: Synthetic peptide
  Seed: HIHIFSFTGEEMATK
HIHIFSLTFEEFATK

SEQ ID NO: 279958 - protein, 15 aa, Artificial Sequence
  Description of Artificial Sequence: Synthetic peptide
  Seed: HIHIFSFTGEEMATK
HIHIFSLTFEEHATK

SEQ ID NO: 279959 - protein, 15 aa, Artificial Sequence
  Description of Artificial Sequence: Synthetic peptide
  Seed: HIHIFSFTGEEMATK
HIHIFSLTFEEIATK

SEQ ID NO: 279960 - protein, 15 aa, Artificial Sequence
  Description of Artificial Sequence: Synthetic peptide
  Seed: HIHIFSFTGEEMATK
HIHIFSLTFEEKATK

SEQ ID NO: 279961 - protein, 15 aa, Artificial Sequence
  Description of Artificial Sequence: Synthetic peptide
  Seed: HIHIFSFTGEEMATK
HIHIFSLTFEELATK

SEQ ID NO: 279962 - protein, 15 aa, Artificial Sequence
  Description of Artificial Sequence: Synthetic peptide
  Seed: HIHIFSFTGEEMATK
HIHIFSLTFEEMATK

SEQ ID NO: 279963 - protein, 15 aa, Artificial Sequence
  Description of Artificial Sequence: Synthetic peptide
  Seed: HIHIFSFTGEEMATK
HIHIFSLTFEENATK

SEQ ID NO: 279964 - protein, 15 aa, Artificial Sequence
  Description of Artificial Sequence: Synthetic peptide
  Seed: HIHIFSFTGEEMATK
HIHIFSLTFEEPATK

SEQ ID NO: 279965 - protein, 15 aa, Artificial Sequence
  Description of Artificial Sequence: Synthetic peptide
  Seed: HIHIFSFTGEEMATK
HIHIFSLTFEEQATK

SEQ ID NO: 279966 - protein, 15 aa, Artificial Sequence
  Description of Artificial Sequence: Synthetic peptide
  Seed: HIHIFSFTGEEMATK
HIHIFSLTFEERATK

SEQ ID NO: 279967 - protein, 15 aa, Artificial Sequence
  Description of Artificial Sequence: Synthetic peptide
  Seed: HIHIFSFTGEEMATK
HIHIFSLTFEESATK

SEQ ID NO: 279968 - protein, 15 aa, Artificial Sequence
  Description of Artificial Sequence: Synthetic peptide
  Seed: HIHIFSFTGEEMATK
HIHIFSLTFEETATK

SEQ ID NO: 279969 - protein, 15 aa, Artificial Sequence
  Description of Artificial Sequence: Synthetic peptide
  Seed: HIHIFSFTGEEMATK
HIHIFSLTFEEVATK

SEQ ID NO: 279970 - protein, 15 aa, Artificial Sequence
  Description of Artificial Sequence: Synthetic peptide
  Seed: HIHIFSFTGEEMATK
HIHIFSLTFEEWATK

SEQ ID NO: 279971 - protein, 15 aa, Artificial Sequence
  Description of Artificial Sequence: Synthetic peptide
  Seed: HIHIFSFTGEEMATK
HIHIFSLTFEEYATK

SEQ ID NO: 279972 - protein, 15 aa, Artificial Sequence
  Description of Artificial Sequence: Synthetic peptide
  Seed: HIHIFSFTGEEMATK
HIHIFSLTIEEAATK

SEQ ID NO: 279973 - protein, 15 aa, Artificial Sequence
  Description of Artificial Sequence: Synthetic peptide
  Seed: HIHIFSFTGEEMATK
HIHIFSLTIEEFATK

SEQ ID NO: 279974 - protein, 15 aa, Artificial Sequence
  Description of Artificial Sequence: Synthetic peptide
  Seed: HIHIFSFTGEEMATK
HIHIFSLTIEEIATK

SEQ ID NO: 279975 - protein, 15 aa, Artificial Sequence
  Description of Artificial Sequence: Synthetic peptide
  Seed: HIHIFSFTGEEMATK
HIHIFSLTIEELATK

SEQ ID NO: 279976 - protein, 15 aa, Artificial Sequence
  Description of Artificial Sequence: Synthetic peptide
  Seed: HIHIFSFTGEEMATK
HIHIFSLTIEENATK

SEQ ID NO: 279977 - protein, 15 aa, Artificial Sequence
  Description of Artificial Sequence: Synthetic peptide
  Seed: HIHIFSFTGEEMATK
HIHIFSLTIEESATK

SEQ ID NO: 279978 - protein, 15 aa, Artificial Sequence
  Description of Artificial Sequence: Synthetic peptide
  Seed: HIHIFSFTGEEMATK
HIHIFSLTIEETATK

SEQ ID NO: 279979 - protein, 15 aa, Artificial Sequence
  Description of Artificial Sequence: Synthetic peptide
  Seed: HIHIFSFTGEEMATK
HIHIFSLTIEEVATK

SEQ ID NO: 279980 - protein, 15 aa, Artificial Sequence
  Description of Artificial Sequence: Synthetic peptide
  Seed: HIHIFSFTGEEMATK
HIHIFSLTLEEFATK

SEQ ID NO: 279981 - protein, 15 aa, Artificial Sequence
  Description of Artificial Sequence: Synthetic peptide
  Seed: HIHIFSFTGEEMATK
HIHIFSLTLEEIATK

SEQ ID NO: 279982 - protein, 15 aa, Artificial Sequence
  Description of Artificial Sequence: Synthetic peptide
  Seed: HIHIFSFTGEEMATK
HIHIFSLTLEELATK

SEQ ID NO: 279983 - protein, 15 aa, Artificial Sequence
  Description of Artificial Sequence: Synthetic peptide
  Seed: HIHIFSFTGEEMATK
HIHIFSLTLEEMATK

SEQ ID NO: 279984 - protein, 15 aa, Artificial Sequence
  Description of Artificial Sequence: Synthetic peptide
  Seed: HIHIFSFTGEEMATK
HIHIFSLTLEEVATK

SEQ ID NO: 279985 - protein, 15 aa, Artificial Sequence
  Description of Artificial Sequence: Synthetic peptide
  Seed: HIHIFSFTGEEMATK
HIHIFSLTLEEYATK

SEQ ID NO: 279986 - protein, 15 aa, Artificial Sequence
  Description of Artificial Sequence: Synthetic peptide
  Seed: HIHIFSFTGEEMATK
HIHIFSLTMEEFATK

SEQ ID NO: 279987 - protein, 15 aa, Artificial Sequence
  Description of Artificial Sequence: Synthetic peptide
  Seed: HIHIFSFTGEEMATK
HIHIFSLTMEEIATK

SEQ ID NO: 279988 - protein, 15 aa, Artificial Sequence
  Description of Artificial Sequence: Synthetic peptide
  Seed: HIHIFSFTGEEMATK
HIHIFSLTMEELATK

SEQ ID NO: 279989 - protein, 15 aa, Artificial Sequence
  Description of Artificial Sequence: Synthetic peptide
  Seed: HIHIFSFTGEEMATK
HIHIFSLTMEEMATK

SEQ ID NO: 279990 - protein, 15 aa, Artificial Sequence
  Description of Artificial Sequence: Synthetic peptide
  Seed: HIHIFSFTGEEMATK
HIHIFSLTMEEVATK

SEQ ID NO: 279991 - protein, 15 aa, Artificial Sequence
  Description of Artificial Sequence: Synthetic peptide
  Seed: HIHIFSFTGEEMATK
HIHIFSLTNEEAATK

SEQ ID NO: 279992 - protein, 15 aa, Artificial Sequence
  Description of Artificial Sequence: Synthetic peptide
  Seed: HIHIFSFTGEEMATK
HIHIFSLTNEEIATK

SEQ ID NO: 279993 - protein, 15 aa, Artificial Sequence
  Description of Artificial Sequence: Synthetic peptide
  Seed: HIHIFSFTGEEMATK
HIHIFSLTNEELATK

SEQ ID NO: 279994 - protein, 15 aa, Artificial Sequence
  Description of Artificial Sequence: Synthetic peptide
  Seed: HIHIFSFTGEEMATK
HIHIFSLTNEEVATK

SEQ ID NO: 279995 - protein, 15 aa, Artificial Sequence
  Description of Artificial Sequence: Synthetic peptide
  Seed: HIHIFSFTGEEMATK
HIHIFSLTPEEAATK

SEQ ID NO: 279996 - protein, 15 aa, Artificial Sequence
  Description of Artificial Sequence: Synthetic peptide
  Seed: HIHIFSFTGEEMATK
HIHIFSLTPEEIATK

SEQ ID NO: 279997 - protein, 15 aa, Artificial Sequence
  Description of Artificial Sequence: Synthetic peptide
  Seed: HIHIFSFTGEEMATK
HIHIFSLTPEELATK

SEQ ID NO: 279998 - protein, 15 aa, Artificial Sequence
  Description of Artificial Sequence: Synthetic peptide
  Seed: HIHIFSFTGEEMATK
HIHIFSLTPEEMATK

SEQ ID NO: 279999 - protein, 15 aa, Artificial Sequence
  Description of Artificial Sequence: Synthetic peptide
  Seed: HIHIFSFTGEEMATK
HIHIFSLTPEENATK

SEQ ID NO: 280000 - protein, 15 aa, Artificial Sequence
  Description of Artificial Sequence: Synthetic peptide
  Seed: HIHIFSFTGEEMATK
HIHIFSLTPEESATK

SEQ ID NO: 280001 - protein, 15 aa, Artificial Sequence
  Description of Artificial Sequence: Synthetic peptide
  Seed: HIHIFSFTGEEMATK
HIHIFSLTPEETATK

SEQ ID NO: 280002 - protein, 15 aa, Artificial Sequence
  Description of Artificial Sequence: Synthetic peptide
  Seed: HIHIFSFTGEEMATK
HIHIFSLTPEEVATK

SEQ ID NO: 280003 - protein, 15 aa, Artificial Sequence
  Description of Artificial Sequence: Synthetic peptide
  Seed: HIHIFSFTGEEMATK
HIHIFSLTSEEGATK

SEQ ID NO: 280004 - protein, 15 aa, Artificial Sequence
  Description of Artificial Sequence: Synthetic peptide
  Seed: HIHIFSFTGEEMATK
HIHIFSLTSEEIATK

SEQ ID NO: 280005 - protein, 15 aa, Artificial Sequence
  Description of Artificial Sequence: Synthetic peptide
  Seed: HIHIFSFTGEEMATK
HIHIFSLTSEELATK

SEQ ID NO: 280006 - protein, 15 aa, Artificial Sequence
  Description of Artificial Sequence: Synthetic peptide
  Seed: HIHIFSFTGEEMATK
HIHIFSLTSEEMATK

SEQ ID NO: 280007 - protein, 15 aa, Artificial Sequence
  Description of Artificial Sequence: Synthetic peptide
  Seed: HIHIFSFTGEEMATK
HIHIFSLTSEENATK

SEQ ID NO: 280008 - protein, 15 aa, Artificial Sequence
  Description of Artificial Sequence: Synthetic peptide
  Seed: HIHIFSFTGEEMATK
HIHIFSLTSEESATK

SEQ ID NO: 280009 - protein, 15 aa, Artificial Sequence
  Description of Artificial Sequence: Synthetic peptide
  Seed: HIHIFSFTGEEMATK
HIHIFSLTSEETATK

SEQ ID NO: 280010 - protein, 15 aa, Artificial Sequence
  Description of Artificial Sequence: Synthetic peptide
  Seed: HIHIFSFTGEEMATK
HIHIFSLTSEEVATK

SEQ ID NO: 280011 - protein, 15 aa, Artificial Sequence
  Description of Artificial Sequence: Synthetic peptide
  Seed: HIHIFSFTGEEMATK
HIHIFSLTTEEAATK

SEQ ID NO: 280012 - protein, 15 aa, Artificial Sequence
  Description of Artificial Sequence: Synthetic peptide
  Seed: HIHIFSFTGEEMATK
HIHIFSLTTEEIATK

SEQ ID NO: 280013 - protein, 15 aa, Artificial Sequence
  Description of Artificial Sequence: Synthetic peptide
  Seed: HIHIFSFTGEEMATK
HIHIFSLTTEELATK

SEQ ID NO: 280014 - protein, 15 aa, Artificial Sequence
  Description of Artificial Sequence: Synthetic peptide
  Seed: HIHIFSFTGEEMATK
HIHIFSLTTEEMATK

SEQ ID NO: 280015 - protein, 15 aa, Artificial Sequence
  Description of Artificial Sequence: Synthetic peptide
  Seed: HIHIFSFTGEEMATK
HIHIFSLTTEENATK

SEQ ID NO: 280016 - protein, 15 aa, Artificial Sequence
  Description of Artificial Sequence: Synthetic peptide
  Seed: HIHIFSFTGEEMATK
HIHIFSLTTEESATK

SEQ ID NO: 280017 - protein, 15 aa, Artificial Sequence
  Description of Artificial Sequence: Synthetic peptide
  Seed: HIHIFSFTGEEMATK
HIHIFSLTTEETATK

SEQ ID NO: 280018 - protein, 15 aa, Artificial Sequence
  Description of Artificial Sequence: Synthetic peptide
  Seed: HIHIFSFTGEEMATK
HIHIFSLTTEEVATK

SEQ ID NO: 280019 - protein, 15 aa, Artificial Sequence
  Description of Artificial Sequence: Synthetic peptide
  Seed: HIHIFSFTGEEMATK
HIHIFSLTVEEAATK

SEQ ID NO: 280020 - protein, 15 aa, Artificial Sequence
  Description of Artificial Sequence: Synthetic peptide
  Seed: HIHIFSFTGEEMATK
HIHIFSLTVEEHATK

SEQ ID NO: 280021 - protein, 15 aa, Artificial Sequence
  Description of Artificial Sequence: Synthetic peptide
  Seed: HIHIFSFTGEEMATK
HIHIFSLTVEEMATK

SEQ ID NO: 280022 - protein, 15 aa, Artificial Sequence
  Description of Artificial Sequence: Synthetic peptide
  Seed: HIHIFSFTGEEMATK
HIHIFSLTVEENATK

SEQ ID NO: 280023 - protein, 15 aa, Artificial Sequence
  Description of Artificial Sequence: Synthetic peptide
  Seed: HIHIFSFTGEEMATK
HIHIFSLTVEESATK

SEQ ID NO: 280024 - protein, 15 aa, Artificial Sequence
  Description of Artificial Sequence: Synthetic peptide
  Seed: HIHIFSFTGEEMATK
HIHIFSLTVEETATK

SEQ ID NO: 280025 - protein, 15 aa, Artificial Sequence
  Description of Artificial Sequence: Synthetic peptide
  Seed: HIHIFSFTGEEMATK
HIHIFSLTWEEAATK

SEQ ID NO: 280026 - protein, 15 aa, Artificial Sequence
  Description of Artificial Sequence: Synthetic peptide
  Seed: HIHIFSFTGEEMATK
HIHIFSLTWEEFATK

SEQ ID NO: 280027 - protein, 15 aa, Artificial Sequence
  Description of Artificial Sequence: Synthetic peptide
  Seed: HIHIFSFTGEEMATK
HIHIFSLTWEEIATK

SEQ ID NO: 280028 - protein, 15 aa, Artificial Sequence
  Description of Artificial Sequence: Synthetic peptide
  Seed: HIHIFSFTGEEMATK
HIHIFSLTWEELATK

SEQ ID NO: 280029 - protein, 15 aa, Artificial Sequence
  Description of Artificial Sequence: Synthetic peptide
  Seed: HIHIFSFTGEEMATK
HIHIFSLTWEEMATK

SEQ ID NO: 280030 - protein, 15 aa, Artificial Sequence
  Description of Artificial Sequence: Synthetic peptide
  Seed: HIHIFSFTGEEMATK
HIHIFSLTWEETATK

SEQ ID NO: 280031 - protein, 15 aa, Artificial Sequence
  Description of Artificial Sequence: Synthetic peptide
  Seed: HIHIFSFTGEEMATK
HIHIFSLTWEEVATK

SEQ ID NO: 280032 - protein, 15 aa, Artificial Sequence
  Description of Artificial Sequence: Synthetic peptide
  Seed: HIHIFSFTGEEMATK
HIHIFSLTWEEYATK

SEQ ID NO: 280033 - protein, 15 aa, Artificial Sequence
  Description of Artificial Sequence: Synthetic peptide
  Seed: HIHIFSFTGEEMATK
HIHIFSLTYEEAATK

SEQ ID NO: 280034 - protein, 15 aa, Artificial Sequence
  Description of Artificial Sequence: Synthetic peptide
  Seed: HIHIFSFTGEEMATK
HIHIFSLTYEEFATK

SEQ ID NO: 280035 - protein, 15 aa, Artificial Sequence
  Description of Artificial Sequence: Synthetic peptide
  Seed: HIHIFSFTGEEMATK
HIHIFSLTYEEIATK

SEQ ID NO: 280036 - protein, 15 aa, Artificial Sequence
  Description of Artificial Sequence: Synthetic peptide
  Seed: HIHIFSFTGEEMATK
HIHIFSLTYEELATK

SEQ ID NO: 280037 - protein, 15 aa, Artificial Sequence
  Description of Artificial Sequence: Synthetic peptide
  Seed: HIHIFSFTGEEMATK
HIHIFSLTYEEMATK

SEQ ID NO: 280038 - protein, 15 aa, Artificial Sequence
  Description of Artificial Sequence: Synthetic peptide
  Seed: HIHIFSFTGEEMATK
HIHIFSLTYEETATK

SEQ ID NO: 280039 - protein, 15 aa, Artificial Sequence
  Description of Artificial Sequence: Synthetic peptide
  Seed: HIHIFSFTGEEMATK
HIHIFSLTYEEVATK

SEQ ID NO: 280040 - protein, 15 aa, Artificial Sequence
  Description of Artificial Sequence: Synthetic peptide
  Seed: HIHIFSFTGEEMATK
HIHIFSLTYEEYATK

SEQ ID NO: 280041 - protein, 15 aa, Artificial Sequence
  Description of Artificial Sequence: Synthetic peptide
  Seed: HIHIFSFTGEEMATK
HIHIFSMTAEEAATK

SEQ ID NO: 280042 - protein, 15 aa, Artificial Sequence
  Description of Artificial Sequence: Synthetic peptide
  Seed: HIHIFSFTGEEMATK
HIHIFSMTAEEGATK

SEQ ID NO: 280043 - protein, 15 aa, Artificial Sequence
  Description of Artificial Sequence: Synthetic peptide
  Seed: HIHIFSFTGEEMATK
HIHIFSMTAEEHATK

SEQ ID NO: 280044 - protein, 15 aa, Artificial Sequence
  Description of Artificial Sequence: Synthetic peptide
  Seed: HIHIFSFTGEEMATK
HIHIFSMTAEEIATK

SEQ ID NO: 280045 - protein, 15 aa, Artificial Sequence
  Description of Artificial Sequence: Synthetic peptide
  Seed: HIHIFSFTGEEMATK
HIHIFSMTAEELATK

SEQ ID NO: 280046 - protein, 15 aa, Artificial Sequence
  Description of Artificial Sequence: Synthetic peptide
  Seed: HIHIFSFTGEEMATK
HIHIFSMTAEEMATK

SEQ ID NO: 280047 - protein, 15 aa, Artificial Sequence
  Description of Artificial Sequence: Synthetic peptide
  Seed: HIHIFSFTGEEMATK
HIHIFSMTAEENATK

SEQ ID NO: 280048 - protein, 15 aa, Artificial Sequence
  Description of Artificial Sequence: Synthetic peptide
  Seed: HIHIFSFTGEEMATK
HIHIFSMTAEESATK

SEQ ID NO: 280049 - protein, 15 aa, Artificial Sequence
  Description of Artificial Sequence: Synthetic peptide
  Seed: HIHIFSFTGEEMATK
HIHIFSMTAEETATK

SEQ ID NO: 280050 - protein, 15 aa, Artificial Sequence
  Description of Artificial Sequence: Synthetic peptide
  Seed: HIHIFSFTGEEMATK
HIHIFSMTAEEVATK

SEQ ID NO: 280051 - protein, 15 aa, Artificial Sequence
  Description of Artificial Sequence: Synthetic peptide
  Seed: HIHIFSFTGEEMATK
HIHIFSMTFEEAATK

SEQ ID NO: 280052 - protein, 15 aa, Artificial Sequence
  Description of Artificial Sequence: Synthetic peptide
  Seed: HIHIFSFTGEEMATK
HIHIFSMTFEEDATK

SEQ ID NO: 280053 - protein, 15 aa, Artificial Sequence
  Description of Artificial Sequence: Synthetic peptide
  Seed: HIHIFSFTGEEMATK
HIHIFSMTFEEEATK

SEQ ID NO: 280054 - protein, 15 aa, Artificial Sequence
  Description of Artificial Sequence: Synthetic peptide
  Seed: HIHIFSFTGEEMATK
HIHIFSMTFEEFATK

SEQ ID NO: 280055 - protein, 15 aa, Artificial Sequence
  Description of Artificial Sequence: Synthetic peptide
  Seed: HIHIFSFTGEEMATK
HIHIFSMTFEEHATK

SEQ ID NO: 280056 - protein, 15 aa, Artificial Sequence
  Description of Artificial Sequence: Synthetic peptide
  Seed: HIHIFSFTGEEMATK
HIHIFSMTFEEIATK

SEQ ID NO: 280057 - protein, 15 aa, Artificial Sequence
  Description of Artificial Sequence: Synthetic peptide
  Seed: HIHIFSFTGEEMATK
HIHIFSMTFEELATK

SEQ ID NO: 280058 - protein, 15 aa, Artificial Sequence
  Description of Artificial Sequence: Synthetic peptide
  Seed: HIHIFSFTGEEMATK
HIHIFSMTFEEMATK

SEQ ID NO: 280059 - protein, 15 aa, Artificial Sequence
  Description of Artificial Sequence: Synthetic peptide
  Seed: HIHIFSFTGEEMATK
HIHIFSMTFEENATK

SEQ ID NO: 280060 - protein, 15 aa, Artificial Sequence
  Description of Artificial Sequence: Synthetic peptide
  Seed: HIHIFSFTGEEMATK
HIHIFSMTFEEQATK

SEQ ID NO: 280061 - protein, 15 aa, Artificial Sequence
  Description of Artificial Sequence: Synthetic peptide
  Seed: HIHIFSFTGEEMATK
HIHIFSMTFEERATK

SEQ ID NO: 280062 - protein, 15 aa, Artificial Sequence
  Description of Artificial Sequence: Synthetic peptide
  Seed: HIHIFSFTGEEMATK
HIHIFSMTFEESATK

SEQ ID NO: 280063 - protein, 15 aa, Artificial Sequence
  Description of Artificial Sequence: Synthetic peptide
  Seed: HIHIFSFTGEEMATK
HIHIFSMTFEETATK

SEQ ID NO: 280064 - protein, 15 aa, Artificial Sequence
  Description of Artificial Sequence: Synthetic peptide
  Seed: HIHIFSFTGEEMATK
HIHIFSMTFEEVATK

SEQ ID NO: 280065 - protein, 15 aa, Artificial Sequence
  Description of Artificial Sequence: Synthetic peptide
  Seed: HIHIFSFTGEEMATK
HIHIFSMTFEEYATK

SEQ ID NO: 280066 - protein, 15 aa, Artificial Sequence
  Description of Artificial Sequence: Synthetic peptide
  Seed: HIHIFSFTGEEMATK
HIHIFSMTIEEHATK

SEQ ID NO: 280067 - protein, 15 aa, Artificial Sequence
  Description of Artificial Sequence: Synthetic peptide
  Seed: HIHIFSFTGEEMATK
HIHIFSMTIEEIATK

SEQ ID NO: 280068 - protein, 15 aa, Artificial Sequence
  Description of Artificial Sequence: Synthetic peptide
  Seed: HIHIFSFTGEEMATK
HIHIFSMTIEELATK

SEQ ID NO: 280069 - protein, 15 aa, Artificial Sequence
  Description of Artificial Sequence: Synthetic peptide
  Seed: HIHIFSFTGEEMATK
HIHIFSMTIEEMATK

SEQ ID NO: 280070 - protein, 15 aa, Artificial Sequence
  Description of Artificial Sequence: Synthetic peptide
  Seed: HIHIFSFTGEEMATK
HIHIFSMTIEENATK

SEQ ID NO: 280071 - protein, 15 aa, Artificial Sequence
  Description of Artificial Sequence: Synthetic peptide
  Seed: HIHIFSFTGEEMATK
HIHIFSMTIEESATK

SEQ ID NO: 280072 - protein, 15 aa, Artificial Sequence
  Description of Artificial Sequence: Synthetic peptide
  Seed: HIHIFSFTGEEMATK
HIHIFSMTIEETATK

SEQ ID NO: 280073 - protein, 15 aa, Artificial Sequence
  Description of Artificial Sequence: Synthetic peptide
  Seed: HIHIFSFTGEEMATK
HIHIFSMTIEEVATK

SEQ ID NO: 280074 - protein, 15 aa, Artificial Sequence
  Description of Artificial Sequence: Synthetic peptide
  Seed: HIHIFSFTGEEMATK
HIHIFSMTLEEFATK

SEQ ID NO: 280075 - protein, 15 aa, Artificial Sequence
  Description of Artificial Sequence: Synthetic peptide
  Seed: HIHIFSFTGEEMATK
HIHIFSMTLEEIATK

SEQ ID NO: 280076 - protein, 15 aa, Artificial Sequence
  Description of Artificial Sequence: Synthetic peptide
  Seed: HIHIFSFTGEEMATK
HIHIFSMTLEELATK

SEQ ID NO: 280077 - protein, 15 aa, Artificial Sequence
  Description of Artificial Sequence: Synthetic peptide
  Seed: HIHIFSFTGEEMATK
HIHIFSMTLEEVATK

SEQ ID NO: 280078 - protein, 15 aa, Artificial Sequence
  Description of Artificial Sequence: Synthetic peptide
  Seed: HIHIFSFTGEEMATK
HIHIFSMTMEELATK

SEQ ID NO: 280079 - protein, 15 aa, Artificial Sequence
  Description of Artificial Sequence: Synthetic peptide
  Seed: HIHIFSFTGEEMATK
HIHIFSMTNEEAATK

SEQ ID NO: 280080 - protein, 15 aa, Artificial Sequence
  Description of Artificial Sequence: Synthetic peptide
  Seed: HIHIFSFTGEEMATK
HIHIFSMTNEEIATK

SEQ ID NO: 280081 - protein, 15 aa, Artificial Sequence
  Description of Artificial Sequence: Synthetic peptide
  Seed: HIHIFSFTGEEMATK
HIHIFSMTNEELATK

SEQ ID NO: 280082 - protein, 15 aa, Artificial Sequence
  Description of Artificial Sequence: Synthetic peptide
  Seed: HIHIFSFTGEEMATK
HIHIFSMTNEEVATK

SEQ ID NO: 280083 - protein, 15 aa, Artificial Sequence
  Description of Artificial Sequence: Synthetic peptide
  Seed: HIHIFSFTGEEMATK
HIHIFSMTPEEAATK

SEQ ID NO: 280084 - protein, 15 aa, Artificial Sequence
  Description of Artificial Sequence: Synthetic peptide
  Seed: HIHIFSFTGEEMATK
HIHIFSMTPEEIATK

SEQ ID NO: 280085 - protein, 15 aa, Artificial Sequence
  Description of Artificial Sequence: Synthetic peptide
  Seed: HIHIFSFTGEEMATK
HIHIFSMTPEELATK

SEQ ID NO: 280086 - protein, 15 aa, Artificial Sequence
  Description of Artificial Sequence: Synthetic peptide
  Seed: HIHIFSFTGEEMATK
HIHIFSMTPEEMATK

SEQ ID NO: 280087 - protein, 15 aa, Artificial Sequence
  Description of Artificial Sequence: Synthetic peptide
  Seed: HIHIFSFTGEEMATK
HIHIFSMTPEENATK

SEQ ID NO: 280088 - protein, 15 aa, Artificial Sequence
  Description of Artificial Sequence: Synthetic peptide
  Seed: HIHIFSFTGEEMATK
HIHIFSMTPEESATK

SEQ ID NO: 280089 - protein, 15 aa, Artificial Sequence
  Description of Artificial Sequence: Synthetic peptide
  Seed: HIHIFSFTGEEMATK
HIHIFSMTPEETATK

SEQ ID NO: 280090 - protein, 15 aa, Artificial Sequence
  Description of Artificial Sequence: Synthetic peptide
  Seed: HIHIFSFTGEEMATK
HIHIFSMTPEEVATK

SEQ ID NO: 280091 - protein, 15 aa, Artificial Sequence
  Description of Artificial Sequence: Synthetic peptide
  Seed: HIHIFSFTGEEMATK
HIHIFSMTSEEAATK

SEQ ID NO: 280092 - protein, 15 aa, Artificial Sequence
  Description of Artificial Sequence: Synthetic peptide
  Seed: HIHIFSFTGEEMATK
HIHIFSMTSEEIATK

SEQ ID NO: 280093 - protein, 15 aa, Artificial Sequence
  Description of Artificial Sequence: Synthetic peptide
  Seed: HIHIFSFTGEEMATK
HIHIFSMTSEELATK

SEQ ID NO: 280094 - protein, 15 aa, Artificial Sequence
  Description of Artificial Sequence: Synthetic peptide
  Seed: HIHIFSFTGEEMATK
HIHIFSMTSEEMATK

SEQ ID NO: 280095 - protein, 15 aa, Artificial Sequence
  Description of Artificial Sequence: Synthetic peptide
  Seed: HIHIFSFTGEEMATK
HIHIFSMTSEENATK

SEQ ID NO: 280096 - protein, 15 aa, Artificial Sequence
  Description of Artificial Sequence: Synthetic peptide
  Seed: HIHIFSFTGEEMATK
HIHIFSMTSEESATK

SEQ ID NO: 280097 - protein, 15 aa, Artificial Sequence
  Description of Artificial Sequence: Synthetic peptide
  Seed: HIHIFSFTGEEMATK
HIHIFSMTSEETATK

SEQ ID NO: 280098 - protein, 15 aa, Artificial Sequence
  Description of Artificial Sequence: Synthetic peptide
  Seed: HIHIFSFTGEEMATK
HIHIFSMTSEEVATK

SEQ ID NO: 280099 - protein, 15 aa, Artificial Sequence
  Description of Artificial Sequence: Synthetic peptide
  Seed: HIHIFSFTGEEMATK
HIHIFSMTTEEAATK

SEQ ID NO: 280100 - protein, 15 aa, Artificial Sequence
  Description of Artificial Sequence: Synthetic peptide
  Seed: HIHIFSFTGEEMATK
HIHIFSMTTEEIATK

SEQ ID NO: 280101 - protein, 15 aa, Artificial Sequence
  Description of Artificial Sequence: Synthetic peptide
  Seed: HIHIFSFTGEEMATK
HIHIFSMTTEELATK

SEQ ID NO: 280102 - protein, 15 aa, Artificial Sequence
  Description of Artificial Sequence: Synthetic peptide
  Seed: HIHIFSFTGEEMATK
HIHIFSMTTEEMATK

SEQ ID NO: 280103 - protein, 15 aa, Artificial Sequence
  Description of Artificial Sequence: Synthetic peptide
  Seed: HIHIFSFTGEEMATK
HIHIFSMTTEENATK

SEQ ID NO: 280104 - protein, 15 aa, Artificial Sequence
  Description of Artificial Sequence: Synthetic peptide
  Seed: HIHIFSFTGEEMATK
HIHIFSMTTEESATK

SEQ ID NO: 280105 - protein, 15 aa, Artificial Sequence
  Description of Artificial Sequence: Synthetic peptide
  Seed: HIHIFSFTGEEMATK
HIHIFSMTTEETATK

SEQ ID NO: 280106 - protein, 15 aa, Artificial Sequence
  Description of Artificial Sequence: Synthetic peptide
  Seed: HIHIFSFTGEEMATK
HIHIFSMTTEEVATK

SEQ ID NO: 280107 - protein, 15 aa, Artificial Sequence
  Description of Artificial Sequence: Synthetic peptide
  Seed: HIHIFSFTGEEMATK
HIHIFSMTVEEAATK

SEQ ID NO: 280108 - protein, 15 aa, Artificial Sequence
  Description of Artificial Sequence: Synthetic peptide
  Seed: HIHIFSFTGEEMATK
HIHIFSMTVEEHATK

SEQ ID NO: 280109 - protein, 15 aa, Artificial Sequence
  Description of Artificial Sequence: Synthetic peptide
  Seed: HIHIFSFTGEEMATK
HIHIFSMTVEELATK

SEQ ID NO: 280110 - protein, 15 aa, Artificial Sequence
  Description of Artificial Sequence: Synthetic peptide
  Seed: HIHIFSFTGEEMATK
HIHIFSMTVEEMATK

SEQ ID NO: 280111 - protein, 15 aa, Artificial Sequence
  Description of Artificial Sequence: Synthetic peptide
  Seed: HIHIFSFTGEEMATK
HIHIFSMTVEENATK

SEQ ID NO: 280112 - protein, 15 aa, Artificial Sequence
  Description of Artificial Sequence: Synthetic peptide
  Seed: HIHIFSFTGEEMATK
HIHIFSMTVEESATK

SEQ ID NO: 280113 - protein, 15 aa, Artificial Sequence
  Description of Artificial Sequence: Synthetic peptide
  Seed: HIHIFSFTGEEMATK
HIHIFSMTVEETATK

SEQ ID NO: 280114 - protein, 15 aa, Artificial Sequence
  Description of Artificial Sequence: Synthetic peptide
  Seed: HIHIFSFTGEEMATK
HIHIFSMTVEEVATK

SEQ ID NO: 280115 - protein, 15 aa, Artificial Sequence
  Description of Artificial Sequence: Synthetic peptide
  Seed: HIHIFSFTGEEMATK
HIHIFSMTWEEFATK

SEQ ID NO: 280116 - protein, 15 aa, Artificial Sequence
  Description of Artificial Sequence: Synthetic peptide
  Seed: HIHIFSFTGEEMATK
HIHIFSMTWEEIATK

SEQ ID NO: 280117 - protein, 15 aa, Artificial Sequence
  Description of Artificial Sequence: Synthetic peptide
  Seed: HIHIFSFTGEEMATK
HIHIFSMTWEELATK

SEQ ID NO: 280118 - protein, 15 aa, Artificial Sequence
  Description of Artificial Sequence: Synthetic peptide
  Seed: HIHIFSFTGEEMATK
HIHIFSMTWEEMATK

SEQ ID NO: 280119 - protein, 15 aa, Artificial Sequence
  Description of Artificial Sequence: Synthetic peptide
  Seed: HIHIFSFTGEEMATK
HIHIFSMTWEEVATK

SEQ ID NO: 280120 - protein, 15 aa, Artificial Sequence
  Description of Artificial Sequence: Synthetic peptide
  Seed: HIHIFSFTGEEMATK
HIHIFSMTWEEYATK

SEQ ID NO: 280121 - protein, 15 aa, Artificial Sequence
  Description of Artificial Sequence: Synthetic peptide
  Seed: HIHIFSFTGEEMATK
HIHIFSMTYEEFATK

SEQ ID NO: 280122 - protein, 15 aa, Artificial Sequence
  Description of Artificial Sequence: Synthetic peptide
  Seed: HIHIFSFTGEEMATK
HIHIFSMTYEEIATK

SEQ ID NO: 280123 - protein, 15 aa, Artificial Sequence
  Description of Artificial Sequence: Synthetic peptide
  Seed: HIHIFSFTGEEMATK
HIHIFSMTYEELATK

SEQ ID NO: 280124 - protein, 15 aa, Artificial Sequence
  Description of Artificial Sequence: Synthetic peptide
  Seed: HIHIFSFTGEEMATK
HIHIFSMTYEEMATK

SEQ ID NO: 280125 - protein, 15 aa, Artificial Sequence
  Description of Artificial Sequence: Synthetic peptide
  Seed: HIHIFSFTGEEMATK
HIHIFSMTYEEVATK

SEQ ID NO: 280126 - protein, 15 aa, Artificial Sequence
  Description of Artificial Sequence: Synthetic peptide
  Seed: HIHIFSFTGEEMATK
HIHIFSMTYEEYATK

SEQ ID NO: 280127 - protein, 15 aa, Artificial Sequence
  Description of Artificial Sequence: Synthetic peptide
  Seed: HIHIFSFTGEEMATK
HIHIFSNTFEEAATK

SEQ ID NO: 280128 - protein, 15 aa, Artificial Sequence
  Description of Artificial Sequence: Synthetic peptide
  Seed: HIHIFSFTGEEMATK
HIHIFSNTFEEFATK

SEQ ID NO: 280129 - protein, 15 aa, Artificial Sequence
  Description of Artificial Sequence: Synthetic peptide
  Seed: HIHIFSFTGEEMATK
HIHIFSNTFEEIATK

SEQ ID NO: 280130 - protein, 15 aa, Artificial Sequence
  Description of Artificial Sequence: Synthetic peptide
  Seed: HIHIFSFTGEEMATK
HIHIFSNTFEELATK

SEQ ID NO: 280131 - protein, 15 aa, Artificial Sequence
  Description of Artificial Sequence: Synthetic peptide
  Seed: HIHIFSFTGEEMATK
HIHIFSNTFEEMATK

SEQ ID NO: 280132 - protein, 15 aa, Artificial Sequence
  Description of Artificial Sequence: Synthetic peptide
  Seed: HIHIFSFTGEEMATK
HIHIFSNTFEESATK

SEQ ID NO: 280133 - protein, 15 aa, Artificial Sequence
  Description of Artificial Sequence: Synthetic peptide
  Seed: HIHIFSFTGEEMATK
HIHIFSNTFEETATK

SEQ ID NO: 280134 - protein, 15 aa, Artificial Sequence
  Description of Artificial Sequence: Synthetic peptide
  Seed: HIHIFSFTGEEMATK
HIHIFSNTFEEVATK

SEQ ID NO: 280135 - protein, 15 aa, Artificial Sequence
  Description of Artificial Sequence: Synthetic peptide
  Seed: HIHIFSFTGEEMATK
HIHIFSNTYEELATK

SEQ ID NO: 280136 - protein, 15 aa, Artificial Sequence
  Description of Artificial Sequence: Synthetic peptide
  Seed: HIHIFSFTGEEMATK
HIHIFSPTFEEIATK

SEQ ID NO: 280137 - protein, 15 aa, Artificial Sequence
  Description of Artificial Sequence: Synthetic peptide
  Seed: HIHIFSFTGEEMATK
HIHIFSPTFEELATK

SEQ ID NO: 280138 - protein, 15 aa, Artificial Sequence
  Description of Artificial Sequence: Synthetic peptide
  Seed: HIHIFSFTGEEMATK
HIHIFSQTAEEAATK

SEQ ID NO: 280139 - protein, 15 aa, Artificial Sequence
  Description of Artificial Sequence: Synthetic peptide
  Seed: HIHIFSFTGEEMATK
HIHIFSQTAEEIATK

SEQ ID NO: 280140 - protein, 15 aa, Artificial Sequence
  Description of Artificial Sequence: Synthetic peptide
  Seed: HIHIFSFTGEEMATK
HIHIFSQTAEELATK

SEQ ID NO: 280141 - protein, 15 aa, Artificial Sequence
  Description of Artificial Sequence: Synthetic peptide
  Seed: HIHIFSFTGEEMATK
HIHIFSQTAEEVATK

SEQ ID NO: 280142 - protein, 15 aa, Artificial Sequence
  Description of Artificial Sequence: Synthetic peptide
  Seed: HIHIFSFTGEEMATK
HIHIFSQTFEEAATK

SEQ ID NO: 280143 - protein, 15 aa, Artificial Sequence
  Description of Artificial Sequence: Synthetic peptide
  Seed: HIHIFSFTGEEMATK
HIHIFSQTFEEFATK

SEQ ID NO: 280144 - protein, 15 aa, Artificial Sequence
  Description of Artificial Sequence: Synthetic peptide
  Seed: HIHIFSFTGEEMATK
HIHIFSQTFEEIATK

SEQ ID NO: 280145 - protein, 15 aa, Artificial Sequence
  Description of Artificial Sequence: Synthetic peptide
  Seed: HIHIFSFTGEEMATK
HIHIFSQTFEELATK

SEQ ID NO: 280146 - protein, 15 aa, Artificial Sequence
  Description of Artificial Sequence: Synthetic peptide
  Seed: HIHIFSFTGEEMATK
HIHIFSQTFEEMATK

SEQ ID NO: 280147 - protein, 15 aa, Artificial Sequence
  Description of Artificial Sequence: Synthetic peptide
  Seed: HIHIFSFTGEEMATK
HIHIFSQTFEESATK

SEQ ID NO: 280148 - protein, 15 aa, Artificial Sequence
  Description of Artificial Sequence: Synthetic peptide
  Seed: HIHIFSFTGEEMATK
HIHIFSQTFEETATK

SEQ ID NO: 280149 - protein, 15 aa, Artificial Sequence
  Description of Artificial Sequence: Synthetic peptide
  Seed: HIHIFSFTGEEMATK
HIHIFSQTFEEVATK

SEQ ID NO: 280150 - protein, 15 aa, Artificial Sequence
  Description of Artificial Sequence: Synthetic peptide
  Seed: HIHIFSFTGEEMATK
HIHIFSQTFEEYATK

SEQ ID NO: 280151 - protein, 15 aa, Artificial Sequence
  Description of Artificial Sequence: Synthetic peptide
  Seed: HIHIFSFTGEEMATK
HIHIFSQTLEEIATK

SEQ ID NO: 280152 - protein, 15 aa, Artificial Sequence
  Description of Artificial Sequence: Synthetic peptide
  Seed: HIHIFSFTGEEMATK
HIHIFSQTLEELATK

SEQ ID NO: 280153 - protein, 15 aa, Artificial Sequence
  Description of Artificial Sequence: Synthetic peptide
  Seed: HIHIFSFTGEEMATK
HIHIFSQTWEEIATK

SEQ ID NO: 280154 - protein, 15 aa, Artificial Sequence
  Description of Artificial Sequence: Synthetic peptide
  Seed: HIHIFSFTGEEMATK
HIHIFSQTWEELATK

SEQ ID NO: 280155 - protein, 15 aa, Artificial Sequence
  Description of Artificial Sequence: Synthetic peptide
  Seed: HIHIFSFTGEEMATK
HIHIFSQTWEEVATK

SEQ ID NO: 280156 - protein, 15 aa, Artificial Sequence
  Description of Artificial Sequence: Synthetic peptide
  Seed: HIHIFSFTGEEMATK
HIHIFSQTYEEIATK

SEQ ID NO: 280157 - protein, 15 aa, Artificial Sequence
  Description of Artificial Sequence: Synthetic peptide
  Seed: HIHIFSFTGEEMATK
HIHIFSQTYEELATK

SEQ ID NO: 280158 - protein, 15 aa, Artificial Sequence
  Description of Artificial Sequence: Synthetic peptide
  Seed: HIHIFSFTGEEMATK
HIHIFSQTYEEVATK

SEQ ID NO: 280159 - protein, 15 aa, Artificial Sequence
  Description of Artificial Sequence: Synthetic peptide
  Seed: HIHIFSFTGEEMATK
HIHIFSRTFEEFATK

SEQ ID NO: 280160 - protein, 15 aa, Artificial Sequence
  Description of Artificial Sequence: Synthetic peptide
  Seed: HIHIFSFTGEEMATK
HIHIFSRTFEEIATK

SEQ ID NO: 280161 - protein, 15 aa, Artificial Sequence
  Description of Artificial Sequence: Synthetic peptide
  Seed: HIHIFSFTGEEMATK
HIHIFSRTFEELATK

SEQ ID NO: 280162 - protein, 15 aa, Artificial Sequence
  Description of Artificial Sequence: Synthetic peptide
  Seed: HIHIFSFTGEEMATK
HIHIFSRTFEEMATK

SEQ ID NO: 280163 - protein, 15 aa, Artificial Sequence
  Description of Artificial Sequence: Synthetic peptide
  Seed: HIHIFSFTGEEMATK
HIHIFSRTFEEVATK

SEQ ID NO: 280164 - protein, 15 aa, Artificial Sequence
  Description of Artificial Sequence: Synthetic peptide
  Seed: HIHIFSFTGEEMATK
HIHIFSSTFEEAATK

SEQ ID NO: 280165 - protein, 15 aa, Artificial Sequence
  Description of Artificial Sequence: Synthetic peptide
  Seed: HIHIFSFTGEEMATK
HIHIFSSTFEEDATK

SEQ ID NO: 280166 - protein, 15 aa, Artificial Sequence
  Description of Artificial Sequence: Synthetic peptide
  Seed: HIHIFSFTGEEMATK
HIHIFSSTFEEEATK

SEQ ID NO: 280167 - protein, 15 aa, Artificial Sequence
  Description of Artificial Sequence: Synthetic peptide
  Seed: HIHIFSFTGEEMATK
HIHIFSSTFEEFATK

SEQ ID NO: 280168 - protein, 15 aa, Artificial Sequence
  Description of Artificial Sequence: Synthetic peptide
  Seed: HIHIFSFTGEEMATK
HIHIFSSTFEEHATK

SEQ ID NO: 280169 - protein, 15 aa, Artificial Sequence
  Description of Artificial Sequence: Synthetic peptide
  Seed: HIHIFSFTGEEMATK
HIHIFSSTFEEIATK

SEQ ID NO: 280170 - protein, 15 aa, Artificial Sequence
  Description of Artificial Sequence: Synthetic peptide
  Seed: HIHIFSFTGEEMATK
HIHIFSSTFEELATK

SEQ ID NO: 280171 - protein, 15 aa, Artificial Sequence
  Description of Artificial Sequence: Synthetic peptide
  Seed: HIHIFSFTGEEMATK
HIHIFSSTFEEMATK

SEQ ID NO: 280172 - protein, 15 aa, Artificial Sequence
  Description of Artificial Sequence: Synthetic peptide
  Seed: HIHIFSFTGEEMATK
HIHIFSSTFEENATK

SEQ ID NO: 280173 - protein, 15 aa, Artificial Sequence
  Description of Artificial Sequence: Synthetic peptide
  Seed: HIHIFSFTGEEMATK
HIHIFSSTFEEPATK

SEQ ID NO: 280174 - protein, 15 aa, Artificial Sequence
  Description of Artificial Sequence: Synthetic peptide
  Seed: HIHIFSFTGEEMATK
HIHIFSSTFEEQATK

SEQ ID NO: 280175 - protein, 15 aa, Artificial Sequence
  Description of Artificial Sequence: Synthetic peptide
  Seed: HIHIFSFTGEEMATK
HIHIFSSTFEESATK

SEQ ID NO: 280176 - protein, 15 aa, Artificial Sequence
  Description of Artificial Sequence: Synthetic peptide
  Seed: HIHIFSFTGEEMATK
HIHIFSSTFEETATK

SEQ ID NO: 280177 - protein, 15 aa, Artificial Sequence
  Description of Artificial Sequence: Synthetic peptide
  Seed: HIHIFSFTGEEMATK
HIHIFSSTFEEVATK

SEQ ID NO: 280178 - protein, 15 aa, Artificial Sequence
  Description of Artificial Sequence: Synthetic peptide
  Seed: HIHIFSFTGEEMATK
HIHIFSSTFEEWATK

SEQ ID NO: 280179 - protein, 15 aa, Artificial Sequence
  Description of Artificial Sequence: Synthetic peptide
  Seed: HIHIFSFTGEEMATK
HIHIFSSTFEEYATK

SEQ ID NO: 280180 - protein, 15 aa, Artificial Sequence
  Description of Artificial Sequence: Synthetic peptide
  Seed: HIHIFSFTGEEMATK
HIHIFSSTIEEIATK

SEQ ID NO: 280181 - protein, 15 aa, Artificial Sequence
  Description of Artificial Sequence: Synthetic peptide
  Seed: HIHIFSFTGEEMATK
HIHIFSSTIEELATK

SEQ ID NO: 280182 - protein, 15 aa, Artificial Sequence
  Description of Artificial Sequence: Synthetic peptide
  Seed: HIHIFSFTGEEMATK
HIHIFSSTLEEFATK

SEQ ID NO: 280183 - protein, 15 aa, Artificial Sequence
  Description of Artificial Sequence: Synthetic peptide
  Seed: HIHIFSFTGEEMATK
HIHIFSSTLEEIATK

SEQ ID NO: 280184 - protein, 15 aa, Artificial Sequence
  Description of Artificial Sequence: Synthetic peptide
  Seed: HIHIFSFTGEEMATK
HIHIFSSTLEELATK

SEQ ID NO: 280185 - protein, 15 aa, Artificial Sequence
  Description of Artificial Sequence: Synthetic peptide
  Seed: HIHIFSFTGEEMATK
HIHIFSSTLEEVATK

SEQ ID NO: 280186 - protein, 15 aa, Artificial Sequence
  Description of Artificial Sequence: Synthetic peptide
  Seed: HIHIFSFTGEEMATK
HIHIFSSTMEELATK

SEQ ID NO: 280187 - protein, 15 aa, Artificial Sequence
  Description of Artificial Sequence: Synthetic peptide
  Seed: HIHIFSFTGEEMATK
HIHIFSSTWEEFATK

SEQ ID NO: 280188 - protein, 15 aa, Artificial Sequence
  Description of Artificial Sequence: Synthetic peptide
  Seed: HIHIFSFTGEEMATK
HIHIFSSTWEEIATK

SEQ ID NO: 280189 - protein, 15 aa, Artificial Sequence
  Description of Artificial Sequence: Synthetic peptide
  Seed: HIHIFSFTGEEMATK
HIHIFSSTWEELATK

SEQ ID NO: 280190 - protein, 15 aa, Artificial Sequence
  Description of Artificial Sequence: Synthetic peptide
  Seed: HIHIFSFTGEEMATK
HIHIFSSTWEEMATK

SEQ ID NO: 280191 - protein, 15 aa, Artificial Sequence
  Description of Artificial Sequence: Synthetic peptide
  Seed: HIHIFSFTGEEMATK
HIHIFSSTWEEVATK

SEQ ID NO: 280192 - protein, 15 aa, Artificial Sequence
  Description of Artificial Sequence: Synthetic peptide
  Seed: HIHIFSFTGEEMATK
HIHIFSSTYEEFATK

SEQ ID NO: 280193 - protein, 15 aa, Artificial Sequence
  Description of Artificial Sequence: Synthetic peptide
  Seed: HIHIFSFTGEEMATK
HIHIFSSTYEEIATK

SEQ ID NO: 280194 - protein, 15 aa, Artificial Sequence
  Description of Artificial Sequence: Synthetic peptide
  Seed: HIHIFSFTGEEMATK
HIHIFSSTYEELATK

SEQ ID NO: 280195 - protein, 15 aa, Artificial Sequence
  Description of Artificial Sequence: Synthetic peptide
  Seed: HIHIFSFTGEEMATK
HIHIFSSTYEEMATK

SEQ ID NO: 280196 - protein, 15 aa, Artificial Sequence
  Description of Artificial Sequence: Synthetic peptide
  Seed: HIHIFSFTGEEMATK
HIHIFSSTYEEVATK

SEQ ID NO: 280197 - protein, 15 aa, Artificial Sequence
  Description of Artificial Sequence: Synthetic peptide
  Seed: HIHIFSFTGEEMATK
HIHIFSTTFEEAATK

SEQ ID NO: 280198 - protein, 15 aa, Artificial Sequence
  Description of Artificial Sequence: Synthetic peptide
  Seed: HIHIFSFTGEEMATK
HIHIFSTTFEECATK

SEQ ID NO: 280199 - protein, 15 aa, Artificial Sequence
  Description of Artificial Sequence: Synthetic peptide
  Seed: HIHIFSFTGEEMATK
HIHIFSTTFEEDATK

SEQ ID NO: 280200 - protein, 15 aa, Artificial Sequence
  Description of Artificial Sequence: Synthetic peptide
  Seed: HIHIFSFTGEEMATK
HIHIFSTTFEEEATK

SEQ ID NO: 280201 - protein, 15 aa, Artificial Sequence
  Description of Artificial Sequence: Synthetic peptide
  Seed: HIHIFSFTGEEMATK
HIHIFSTTFEEFATK

SEQ ID NO: 280202 - protein, 15 aa, Artificial Sequence
  Description of Artificial Sequence: Synthetic peptide
  Seed: HIHIFSFTGEEMATK
HIHIFSTTFEEHATK

SEQ ID NO: 280203 - protein, 15 aa, Artificial Sequence
  Description of Artificial Sequence: Synthetic peptide
  Seed: HIHIFSFTGEEMATK
HIHIFSTTFEEIATK

SEQ ID NO: 280204 - protein, 15 aa, Artificial Sequence
  Description of Artificial Sequence: Synthetic peptide
  Seed: HIHIFSFTGEEMATK
HIHIFSTTFEEKATK

SEQ ID NO: 280205 - protein, 15 aa, Artificial Sequence
  Description of Artificial Sequence: Synthetic peptide
  Seed: HIHIFSFTGEEMATK
HIHIFSTTFEELATK

SEQ ID NO: 280206 - protein, 15 aa, Artificial Sequence
  Description of Artificial Sequence: Synthetic peptide
  Seed: HIHIFSFTGEEMATK
HIHIFSTTFEEMATK

SEQ ID NO: 280207 - protein, 15 aa, Artificial Sequence
  Description of Artificial Sequence: Synthetic peptide
  Seed: HIHIFSFTGEEMATK
HIHIFSTTFEENATK

SEQ ID NO: 280208 - protein, 15 aa, Artificial Sequence
  Description of Artificial Sequence: Synthetic peptide
  Seed: HIHIFSFTGEEMATK
HIHIFSTTFEEPATK

SEQ ID NO: 280209 - protein, 15 aa, Artificial Sequence
  Description of Artificial Sequence: Synthetic peptide
  Seed: HIHIFSFTGEEMATK
HIHIFSTTFEEQATK

SEQ ID NO: 280210 - protein, 15 aa, Artificial Sequence
  Description of Artificial Sequence: Synthetic peptide
  Seed: HIHIFSFTGEEMATK
HIHIFSTTFEERATK

SEQ ID NO: 280211 - protein, 15 aa, Artificial Sequence
  Description of Artificial Sequence: Synthetic peptide
  Seed: HIHIFSFTGEEMATK
HIHIFSTTFEESATK

SEQ ID NO: 280212 - protein, 15 aa, Artificial Sequence
  Description of Artificial Sequence: Synthetic peptide
  Seed: HIHIFSFTGEEMATK
HIHIFSTTFEETATK

SEQ ID NO: 280213 - protein, 15 aa, Artificial Sequence
  Description of Artificial Sequence: Synthetic peptide
  Seed: HIHIFSFTGEEMATK
HIHIFSTTFEEVATK

SEQ ID NO: 280214 - protein, 15 aa, Artificial Sequence
  Description of Artificial Sequence: Synthetic peptide
  Seed: HIHIFSFTGEEMATK
HIHIFSTTFEEWATK

SEQ ID NO: 280215 - protein, 15 aa, Artificial Sequence
  Description of Artificial Sequence: Synthetic peptide
  Seed: HIHIFSFTGEEMATK
HIHIFSTTFEEYATK

SEQ ID NO: 280216 - protein, 15 aa, Artificial Sequence
  Description of Artificial Sequence: Synthetic peptide
  Seed: HIHIFSFTGEEMATK
HIHIFSTTIEEFATK

SEQ ID NO: 280217 - protein, 15 aa, Artificial Sequence
  Description of Artificial Sequence: Synthetic peptide
  Seed: HIHIFSFTGEEMATK
HIHIFSTTIEEIATK

SEQ ID NO: 280218 - protein, 15 aa, Artificial Sequence
  Description of Artificial Sequence: Synthetic peptide
  Seed: HIHIFSFTGEEMATK
HIHIFSTTIEELATK

SEQ ID NO: 280219 - protein, 15 aa, Artificial Sequence
  Description of Artificial Sequence: Synthetic peptide
  Seed: HIHIFSFTGEEMATK
HIHIFSTTIEEVATK

SEQ ID NO: 280220 - protein, 15 aa, Artificial Sequence
  Description of Artificial Sequence: Synthetic peptide
  Seed: HIHIFSFTGEEMATK
HIHIFSTTLEEFATK

SEQ ID NO: 280221 - protein, 15 aa, Artificial Sequence
  Description of Artificial Sequence: Synthetic peptide
  Seed: HIHIFSFTGEEMATK
HIHIFSTTLEEIATK

SEQ ID NO: 280222 - protein, 15 aa, Artificial Sequence
  Description of Artificial Sequence: Synthetic peptide
  Seed: HIHIFSFTGEEMATK
HIHIFSTTLEELATK

SEQ ID NO: 280223 - protein, 15 aa, Artificial Sequence
  Description of Artificial Sequence: Synthetic peptide
  Seed: HIHIFSFTGEEMATK
HIHIFSTTLEEMATK

SEQ ID NO: 280224 - protein, 15 aa, Artificial Sequence
  Description of Artificial Sequence: Synthetic peptide
  Seed: HIHIFSFTGEEMATK
HIHIFSTTLEEVATK

SEQ ID NO: 280225 - protein, 15 aa, Artificial Sequence
  Description of Artificial Sequence: Synthetic peptide
  Seed: HIHIFSFTGEEMATK
HIHIFSTTMEEFATK

SEQ ID NO: 280226 - protein, 15 aa, Artificial Sequence
  Description of Artificial Sequence: Synthetic peptide
  Seed: HIHIFSFTGEEMATK
HIHIFSTTMEEIATK

SEQ ID NO: 280227 - protein, 15 aa, Artificial Sequence
  Description of Artificial Sequence: Synthetic peptide
  Seed: HIHIFSFTGEEMATK
HIHIFSTTMEELATK

SEQ ID NO: 280228 - protein, 15 aa, Artificial Sequence
  Description of Artificial Sequence: Synthetic peptide
  Seed: HIHIFSFTGEEMATK
HIHIFSTTMEEVATK

SEQ ID NO: 280229 - protein, 15 aa, Artificial Sequence
  Description of Artificial Sequence: Synthetic peptide
  Seed: HIHIFSFTGEEMATK
HIHIFSTTWEEFATK

SEQ ID NO: 280230 - protein, 15 aa, Artificial Sequence
  Description of Artificial Sequence: Synthetic peptide
  Seed: HIHIFSFTGEEMATK
HIHIFSTTWEEIATK

SEQ ID NO: 280231 - protein, 15 aa, Artificial Sequence
  Description of Artificial Sequence: Synthetic peptide
  Seed: HIHIFSFTGEEMATK
HIHIFSTTWEELATK

SEQ ID NO: 280232 - protein, 15 aa, Artificial Sequence
  Description of Artificial Sequence: Synthetic peptide
  Seed: HIHIFSFTGEEMATK
HIHIFSTTWEEMATK

SEQ ID NO: 280233 - protein, 15 aa, Artificial Sequence
  Description of Artificial Sequence: Synthetic peptide
  Seed: HIHIFSFTGEEMATK
HIHIFSTTWEETATK

SEQ ID NO: 280234 - protein, 15 aa, Artificial Sequence
  Description of Artificial Sequence: Synthetic peptide
  Seed: HIHIFSFTGEEMATK
HIHIFSTTWEEVATK

SEQ ID NO: 280235 - protein, 15 aa, Artificial Sequence
  Description of Artificial Sequence: Synthetic peptide
  Seed: HIHIFSFTGEEMATK
HIHIFSTTWEEYATK

SEQ ID NO: 280236 - protein, 15 aa, Artificial Sequence
  Description of Artificial Sequence: Synthetic peptide
  Seed: HIHIFSFTGEEMATK
HIHIFSTTYEEAATK

SEQ ID NO: 280237 - protein, 15 aa, Artificial Sequence
  Description of Artificial Sequence: Synthetic peptide
  Seed: HIHIFSFTGEEMATK
HIHIFSTTYEEFATK

SEQ ID NO: 280238 - protein, 15 aa, Artificial Sequence
  Description of Artificial Sequence: Synthetic peptide
  Seed: HIHIFSFTGEEMATK
HIHIFSTTYEEIATK

SEQ ID NO: 280239 - protein, 15 aa, Artificial Sequence
  Description of Artificial Sequence: Synthetic peptide
  Seed: HIHIFSFTGEEMATK
HIHIFSTTYEELATK

SEQ ID NO: 280240 - protein, 15 aa, Artificial Sequence
  Description of Artificial Sequence: Synthetic peptide
  Seed: HIHIFSFTGEEMATK
HIHIFSTTYEEMATK

SEQ ID NO: 280241 - protein, 15 aa, Artificial Sequence
  Description of Artificial Sequence: Synthetic peptide
  Seed: HIHIFSFTGEEMATK
HIHIFSTTYEETATK

SEQ ID NO: 280242 - protein, 15 aa, Artificial Sequence
  Description of Artificial Sequence: Synthetic peptide
  Seed: HIHIFSFTGEEMATK
HIHIFSTTYEEVATK

SEQ ID NO: 280243 - protein, 15 aa, Artificial Sequence
  Description of Artificial Sequence: Synthetic peptide
  Seed: HIHIFSFTGEEMATK
HIHIFSTTYEEYATK

SEQ ID NO: 280244 - protein, 15 aa, Artificial Sequence
  Description of Artificial Sequence: Synthetic peptide
  Seed: HIHIFSFTGEEMATK
HIHIFSVTAEEAATK

SEQ ID NO: 280245 - protein, 15 aa, Artificial Sequence
  Description of Artificial Sequence: Synthetic peptide
  Seed: HIHIFSFTGEEMATK
HIHIFSVTAEEIATK

SEQ ID NO: 280246 - protein, 15 aa, Artificial Sequence
  Description of Artificial Sequence: Synthetic peptide
  Seed: HIHIFSFTGEEMATK
HIHIFSVTAEELATK

SEQ ID NO: 280247 - protein, 15 aa, Artificial Sequence
  Description of Artificial Sequence: Synthetic peptide
  Seed: HIHIFSFTGEEMATK
HIHIFSVTAEEVATK

SEQ ID NO: 280248 - protein, 15 aa, Artificial Sequence
  Description of Artificial Sequence: Synthetic peptide
  Seed: HIHIFSFTGEEMATK
HIHIFSVTFEEAATK

SEQ ID NO: 280249 - protein, 15 aa, Artificial Sequence
  Description of Artificial Sequence: Synthetic peptide
  Seed: HIHIFSFTGEEMATK
HIHIFSVTFEEDATK

SEQ ID NO: 280250 - protein, 15 aa, Artificial Sequence
  Description of Artificial Sequence: Synthetic peptide
  Seed: HIHIFSFTGEEMATK
HIHIFSVTFEEEATK

SEQ ID NO: 280251 - protein, 15 aa, Artificial Sequence
  Description of Artificial Sequence: Synthetic peptide
  Seed: HIHIFSFTGEEMATK
HIHIFSVTFEEFATK

SEQ ID NO: 280252 - protein, 15 aa, Artificial Sequence
  Description of Artificial Sequence: Synthetic peptide
  Seed: HIHIFSFTGEEMATK
HIHIFSVTFEEHATK

SEQ ID NO: 280253 - protein, 15 aa, Artificial Sequence
  Description of Artificial Sequence: Synthetic peptide
  Seed: HIHIFSFTGEEMATK
HIHIFSVTFEEIATK

SEQ ID NO: 280254 - protein, 15 aa, Artificial Sequence
  Description of Artificial Sequence: Synthetic peptide
  Seed: HIHIFSFTGEEMATK
HIHIFSVTFEEKATK

SEQ ID NO: 280255 - protein, 15 aa, Artificial Sequence
  Description of Artificial Sequence: Synthetic peptide
  Seed: HIHIFSFTGEEMATK
HIHIFSVTFEELATK

SEQ ID NO: 280256 - protein, 15 aa, Artificial Sequence
  Description of Artificial Sequence: Synthetic peptide
  Seed: HIHIFSFTGEEMATK
HIHIFSVTFEEMATK

SEQ ID NO: 280257 - protein, 15 aa, Artificial Sequence
  Description of Artificial Sequence: Synthetic peptide
  Seed: HIHIFSFTGEEMATK
HIHIFSVTFEENATK

SEQ ID NO: 280258 - protein, 15 aa, Artificial Sequence
  Description of Artificial Sequence: Synthetic peptide
  Seed: HIHIFSFTGEEMATK
HIHIFSVTFEEPATK

SEQ ID NO: 280259 - protein, 15 aa, Artificial Sequence
  Description of Artificial Sequence: Synthetic peptide
  Seed: HIHIFSFTGEEMATK
HIHIFSVTFEEQATK

SEQ ID NO: 280260 - protein, 15 aa, Artificial Sequence
  Description of Artificial Sequence: Synthetic peptide
  Seed: HIHIFSFTGEEMATK
HIHIFSVTFEERATK

SEQ ID NO: 280261 - protein, 15 aa, Artificial Sequence
  Description of Artificial Sequence: Synthetic peptide
  Seed: HIHIFSFTGEEMATK
HIHIFSVTFEESATK

SEQ ID NO: 280262 - protein, 15 aa, Artificial Sequence
  Description of Artificial Sequence: Synthetic peptide
  Seed: HIHIFSFTGEEMATK
HIHIFSVTFEETATK

SEQ ID NO: 280263 - protein, 15 aa, Artificial Sequence
  Description of Artificial Sequence: Synthetic peptide
  Seed: HIHIFSFTGEEMATK
HIHIFSVTFEEVATK

SEQ ID NO: 280264 - protein, 15 aa, Artificial Sequence
  Description of Artificial Sequence: Synthetic peptide
  Seed: HIHIFSFTGEEMATK
HIHIFSVTFEEYATK

SEQ ID NO: 280265 - protein, 15 aa, Artificial Sequence
  Description of Artificial Sequence: Synthetic peptide
  Seed: HIHIFSFTGEEMATK
HIHIFSVTIEEIATK

SEQ ID NO: 280266 - protein, 15 aa, Artificial Sequence
  Description of Artificial Sequence: Synthetic peptide
  Seed: HIHIFSFTGEEMATK
HIHIFSVTIEELATK

SEQ ID NO: 280267 - protein, 15 aa, Artificial Sequence
  Description of Artificial Sequence: Synthetic peptide
  Seed: HIHIFSFTGEEMATK
HIHIFSVTIEEVATK

SEQ ID NO: 280268 - protein, 15 aa, Artificial Sequence
  Description of Artificial Sequence: Synthetic peptide
  Seed: HIHIFSFTGEEMATK
HIHIFSVTLEEFATK

SEQ ID NO: 280269 - protein, 15 aa, Artificial Sequence
  Description of Artificial Sequence: Synthetic peptide
  Seed: HIHIFSFTGEEMATK
HIHIFSVTLEEIATK

SEQ ID NO: 280270 - protein, 15 aa, Artificial Sequence
  Description of Artificial Sequence: Synthetic peptide
  Seed: HIHIFSFTGEEMATK
HIHIFSVTLEELATK

SEQ ID NO: 280271 - protein, 15 aa, Artificial Sequence
  Description of Artificial Sequence: Synthetic peptide
  Seed: HIHIFSFTGEEMATK
HIHIFSVTLEEMATK

SEQ ID NO: 280272 - protein, 15 aa, Artificial Sequence
  Description of Artificial Sequence: Synthetic peptide
  Seed: HIHIFSFTGEEMATK
HIHIFSVTLEEVATK

SEQ ID NO: 280273 - protein, 15 aa, Artificial Sequence
  Description of Artificial Sequence: Synthetic peptide
  Seed: HIHIFSFTGEEMATK
HIHIFSVTMEEIATK

SEQ ID NO: 280274 - protein, 15 aa, Artificial Sequence
  Description of Artificial Sequence: Synthetic peptide
  Seed: HIHIFSFTGEEMATK
HIHIFSVTMEELATK

SEQ ID NO: 280275 - protein, 15 aa, Artificial Sequence
  Description of Artificial Sequence: Synthetic peptide
  Seed: HIHIFSFTGEEMATK
HIHIFSVTMEEVATK

SEQ ID NO: 280276 - protein, 15 aa, Artificial Sequence
  Description of Artificial Sequence: Synthetic peptide
  Seed: HIHIFSFTGEEMATK
HIHIFSVTSEEVATK

SEQ ID NO: 280277 - protein, 15 aa, Artificial Sequence
  Description of Artificial Sequence: Synthetic peptide
  Seed: HIHIFSFTGEEMATK
HIHIFSVTWEEAATK

SEQ ID NO: 280278 - protein, 15 aa, Artificial Sequence
  Description of Artificial Sequence: Synthetic peptide
  Seed: HIHIFSFTGEEMATK
HIHIFSVTWEEFATK

SEQ ID NO: 280279 - protein, 15 aa, Artificial Sequence
  Description of Artificial Sequence: Synthetic peptide
  Seed: HIHIFSFTGEEMATK
HIHIFSVTWEEIATK

SEQ ID NO: 280280 - protein, 15 aa, Artificial Sequence
  Description of Artificial Sequence: Synthetic peptide
  Seed: HIHIFSFTGEEMATK
HIHIFSVTWEELATK

SEQ ID NO: 280281 - protein, 15 aa, Artificial Sequence
  Description of Artificial Sequence: Synthetic peptide
  Seed: HIHIFSFTGEEMATK
HIHIFSVTWEEMATK

SEQ ID NO: 280282 - protein, 15 aa, Artificial Sequence
  Description of Artificial Sequence: Synthetic peptide
  Seed: HIHIFSFTGEEMATK
HIHIFSVTWEETATK

SEQ ID NO: 280283 - protein, 15 aa, Artificial Sequence
  Description of Artificial Sequence: Synthetic peptide
  Seed: HIHIFSFTGEEMATK
HIHIFSVTWEEVATK

SEQ ID NO: 280284 - protein, 15 aa, Artificial Sequence
  Description of Artificial Sequence: Synthetic peptide
  Seed: HIHIFSFTGEEMATK
HIHIFSVTWEEYATK

SEQ ID NO: 280285 - protein, 15 aa, Artificial Sequence
  Description of Artificial Sequence: Synthetic peptide
  Seed: HIHIFSFTGEEMATK
HIHIFSVTYEEAATK

SEQ ID NO: 280286 - protein, 15 aa, Artificial Sequence
  Description of Artificial Sequence: Synthetic peptide
  Seed: HIHIFSFTGEEMATK
HIHIFSVTYEEFATK

SEQ ID NO: 280287 - protein, 15 aa, Artificial Sequence
  Description of Artificial Sequence: Synthetic peptide
  Seed: HIHIFSFTGEEMATK
HIHIFSVTYEEIATK

SEQ ID NO: 280288 - protein, 15 aa, Artificial Sequence
  Description of Artificial Sequence: Synthetic peptide
  Seed: HIHIFSFTGEEMATK
HIHIFSVTYEELATK

SEQ ID NO: 280289 - protein, 15 aa, Artificial Sequence
  Description of Artificial Sequence: Synthetic peptide
  Seed: HIHIFSFTGEEMATK
HIHIFSVTYEEMATK

SEQ ID NO: 280290 - protein, 15 aa, Artificial Sequence
  Description of Artificial Sequence: Synthetic peptide
  Seed: HIHIFSFTGEEMATK
HIHIFSVTYEETATK

SEQ ID NO: 280291 - protein, 15 aa, Artificial Sequence
  Description of Artificial Sequence: Synthetic peptide
  Seed: HIHIFSFTGEEMATK
HIHIFSVTYEEVATK

SEQ ID NO: 280292 - protein, 15 aa, Artificial Sequence
  Description of Artificial Sequence: Synthetic peptide
  Seed: HIHIFSFTGEEMATK
HIHIFSVTYEEYATK

SEQ ID NO: 280293 - protein, 15 aa, Artificial Sequence
  Description of Artificial Sequence: Synthetic peptide
  Seed: HIHIFSFTGEEMATK
HIHIFSWTFEEFATK

SEQ ID NO: 280294 - protein, 15 aa, Artificial Sequence
  Description of Artificial Sequence: Synthetic peptide
  Seed: HIHIFSFTGEEMATK
HIHIFSWTFEEIATK

SEQ ID NO: 280295 - protein, 15 aa, Artificial Sequence
  Description of Artificial Sequence: Synthetic peptide
  Seed: HIHIFSFTGEEMATK
HIHIFSWTFEELATK

SEQ ID NO: 280296 - protein, 15 aa, Artificial Sequence
  Description of Artificial Sequence: Synthetic peptide
  Seed: HIHIFSFTGEEMATK
HIHIFSWTFEEMATK

SEQ ID NO: 280297 - protein, 15 aa, Artificial Sequence
  Description of Artificial Sequence: Synthetic peptide
  Seed: HIHIFSFTGEEMATK
HIHIFSWTFEETATK

SEQ ID NO: 280298 - protein, 15 aa, Artificial Sequence
  Description of Artificial Sequence: Synthetic peptide
  Seed: HIHIFSFTGEEMATK
HIHIFSWTFEEVATK

SEQ ID NO: 280299 - protein, 15 aa, Artificial Sequence
  Description of Artificial Sequence: Synthetic peptide
  Seed: HIHIFSFTGEEMATK
HIHIFSWTFEEYATK

SEQ ID NO: 280300 - protein, 15 aa, Artificial Sequence
  Description of Artificial Sequence: Synthetic peptide
  Seed: HIHIFSFTGEEMATK
HIHIFSWTIEELATK

SEQ ID NO: 280301 - protein, 15 aa, Artificial Sequence
  Description of Artificial Sequence: Synthetic peptide
  Seed: HIHIFSFTGEEMATK
HIHIFSWTLEEFATK

SEQ ID NO: 280302 - protein, 15 aa, Artificial Sequence
  Description of Artificial Sequence: Synthetic peptide
  Seed: HIHIFSFTGEEMATK
HIHIFSWTLEEIATK

SEQ ID NO: 280303 - protein, 15 aa, Artificial Sequence
  Description of Artificial Sequence: Synthetic peptide
  Seed: HIHIFSFTGEEMATK
HIHIFSWTLEELATK

SEQ ID NO: 280304 - protein, 15 aa, Artificial Sequence
  Description of Artificial Sequence: Synthetic peptide
  Seed: HIHIFSFTGEEMATK
HIHIFSWTLEEVATK

SEQ ID NO: 280305 - protein, 15 aa, Artificial Sequence
  Description of Artificial Sequence: Synthetic peptide
  Seed: HIHIFSFTGEEMATK
HIHIFSWTMEEFATK

SEQ ID NO: 280306 - protein, 15 aa, Artificial Sequence
  Description of Artificial Sequence: Synthetic peptide
  Seed: HIHIFSFTGEEMATK
HIHIFSWTMEEIATK

SEQ ID NO: 280307 - protein, 15 aa, Artificial Sequence
  Description of Artificial Sequence: Synthetic peptide
  Seed: HIHIFSFTGEEMATK
HIHIFSWTMEELATK

SEQ ID NO: 280308 - protein, 15 aa, Artificial Sequence
  Description of Artificial Sequence: Synthetic peptide
  Seed: HIHIFSFTGEEMATK
HIHIFSWTWEELATK

SEQ ID NO: 280309 - protein, 15 aa, Artificial Sequence
  Description of Artificial Sequence: Synthetic peptide
  Seed: HIHIFSFTGEEMATK
HIHIFSWTYEEFATK

SEQ ID NO: 280310 - protein, 15 aa, Artificial Sequence
  Description of Artificial Sequence: Synthetic peptide
  Seed: HIHIFSFTGEEMATK
HIHIFSWTYEEIATK

SEQ ID NO: 280311 - protein, 15 aa, Artificial Sequence
  Description of Artificial Sequence: Synthetic peptide
  Seed: HIHIFSFTGEEMATK
HIHIFSWTYEELATK

SEQ ID NO: 280312 - protein, 15 aa, Artificial Sequence
  Description of Artificial Sequence: Synthetic peptide
  Seed: HIHIFSFTGEEMATK
HIHIFSWTYEEVATK

SEQ ID NO: 280313 - protein, 15 aa, Artificial Sequence
  Description of Artificial Sequence: Synthetic peptide
  Seed: HIHIFSFTGEEMATK
HIHIFSYTFEEAATK

SEQ ID NO: 280314 - protein, 15 aa, Artificial Sequence
  Description of Artificial Sequence: Synthetic peptide
  Seed: HIHIFSFTGEEMATK
HIHIFSYTFEEFATK

SEQ ID NO: 280315 - protein, 15 aa, Artificial Sequence
  Description of Artificial Sequence: Synthetic peptide
  Seed: HIHIFSFTGEEMATK
HIHIFSYTFEEIATK

SEQ ID NO: 280316 - protein, 15 aa, Artificial Sequence
  Description of Artificial Sequence: Synthetic peptide
  Seed: HIHIFSFTGEEMATK
HIHIFSYTFEELATK

SEQ ID NO: 280317 - protein, 15 aa, Artificial Sequence
  Description of Artificial Sequence: Synthetic peptide
  Seed: HIHIFSFTGEEMATK
HIHIFSYTFEEMATK

SEQ ID NO: 280318 - protein, 15 aa, Artificial Sequence
  Description of Artificial Sequence: Synthetic peptide
  Seed: HIHIFSFTGEEMATK
HIHIFSYTFEESATK

SEQ ID NO: 280319 - protein, 15 aa, Artificial Sequence
  Description of Artificial Sequence: Synthetic peptide
  Seed: HIHIFSFTGEEMATK
HIHIFSYTFEETATK

SEQ ID NO: 280320 - protein, 15 aa, Artificial Sequence
  Description of Artificial Sequence: Synthetic peptide
  Seed: HIHIFSFTGEEMATK
HIHIFSYTFEEVATK

SEQ ID NO: 280321 - protein, 15 aa, Artificial Sequence
  Description of Artificial Sequence: Synthetic peptide
  Seed: HIHIFSFTGEEMATK
HIHIFSYTFEEYATK

SEQ ID NO: 280322 - protein, 15 aa, Artificial Sequence
  Description of Artificial Sequence: Synthetic peptide
  Seed: HIHIFSFTGEEMATK
HIHIFSYTIEEIATK

SEQ ID NO: 280323 - protein, 15 aa, Artificial Sequence
  Description of Artificial Sequence: Synthetic peptide
  Seed: HIHIFSFTGEEMATK
HIHIFSYTIEELATK

SEQ ID NO: 280324 - protein, 15 aa, Artificial Sequence
  Description of Artificial Sequence: Synthetic peptide
  Seed: HIHIFSFTGEEMATK
HIHIFSYTIEEVATK

SEQ ID NO: 280325 - protein, 15 aa, Artificial Sequence
  Description of Artificial Sequence: Synthetic peptide
  Seed: HIHIFSFTGEEMATK
HIHIFSYTLEEFATK

SEQ ID NO: 280326 - protein, 15 aa, Artificial Sequence
  Description of Artificial Sequence: Synthetic peptide
  Seed: HIHIFSFTGEEMATK
HIHIFSYTLEEIATK

SEQ ID NO: 280327 - protein, 15 aa, Artificial Sequence
  Description of Artificial Sequence: Synthetic peptide
  Seed: HIHIFSFTGEEMATK
HIHIFSYTLEELATK

SEQ ID NO: 280328 - protein, 15 aa, Artificial Sequence
  Description of Artificial Sequence: Synthetic peptide
  Seed: HIHIFSFTGEEMATK
HIHIFSYTLEEMATK

SEQ ID NO: 280329 - protein, 15 aa, Artificial Sequence
  Description of Artificial Sequence: Synthetic peptide
  Seed: HIHIFSFTGEEMATK
HIHIFSYTLEEVATK

SEQ ID NO: 280330 - protein, 15 aa, Artificial Sequence
  Description of Artificial Sequence: Synthetic peptide
  Seed: HIHIFSFTGEEMATK
HIHIFSYTMEEIATK

SEQ ID NO: 280331 - protein, 15 aa, Artificial Sequence
  Description of Artificial Sequence: Synthetic peptide
  Seed: HIHIFSFTGEEMATK
HIHIFSYTMEELATK

SEQ ID NO: 280332 - protein, 15 aa, Artificial Sequence
  Description of Artificial Sequence: Synthetic peptide
  Seed: HIHIFSFTGEEMATK
HIHIFSYTNEELATK

SEQ ID NO: 280333 - protein, 15 aa, Artificial Sequence
  Description of Artificial Sequence: Synthetic peptide
  Seed: HIHIFSFTGEEMATK
HIHIFSYTSEEIATK

SEQ ID NO: 280334 - protein, 15 aa, Artificial Sequence
  Description of Artificial Sequence: Synthetic peptide
  Seed: HIHIFSFTGEEMATK
HIHIFSYTSEELATK

SEQ ID NO: 280335 - protein, 15 aa, Artificial Sequence
  Description of Artificial Sequence: Synthetic peptide
  Seed: HIHIFSFTGEEMATK
HIHIFSYTSEEVATK

SEQ ID NO: 280336 - protein, 15 aa, Artificial Sequence
  Description of Artificial Sequence: Synthetic peptide
  Seed: HIHIFSFTGEEMATK
HIHIFSYTWEEFATK

SEQ ID NO: 280337 - protein, 15 aa, Artificial Sequence
  Description of Artificial Sequence: Synthetic peptide
  Seed: HIHIFSFTGEEMATK
HIHIFSYTWEEIATK

SEQ ID NO: 280338 - protein, 15 aa, Artificial Sequence
  Description of Artificial Sequence: Synthetic peptide
  Seed: HIHIFSFTGEEMATK
HIHIFSYTWEELATK

SEQ ID NO: 280339 - protein, 15 aa, Artificial Sequence
  Description of Artificial Sequence: Synthetic peptide
  Seed: HIHIFSFTGEEMATK
HIHIFSYTWEEVATK

SEQ ID NO: 280340 - protein, 15 aa, Artificial Sequence
  Description of Artificial Sequence: Synthetic peptide
  Seed: HIHIFSFTGEEMATK
HIHIFSYTYEEFATK

SEQ ID NO: 280341 - protein, 15 aa, Artificial Sequence
  Description of Artificial Sequence: Synthetic peptide
  Seed: HIHIFSFTGEEMATK
HIHIFSYTYEEIATK

SEQ ID NO: 280342 - protein, 15 aa, Artificial Sequence
  Description of Artificial Sequence: Synthetic peptide
  Seed: HIHIFSFTGEEMATK
HIHIFSYTYEELATK

SEQ ID NO: 280343 - protein, 15 aa, Artificial Sequence
  Description of Artificial Sequence: Synthetic peptide
  Seed: HIHIFSFTGEEMATK
HIHIFSYTYEEVATK

SEQ ID NO: 280344 - protein, 15 aa, Artificial Sequence
  Description of Artificial Sequence: Synthetic peptide
  Seed: HIHIFSFTGEEMATK
HIHKFSFTFEEIATK

SEQ ID NO: 280345 - protein, 15 aa, Artificial Sequence
  Description of Artificial Sequence: Synthetic peptide
  Seed: HIHIFSFTGEEMATK
HIHKFSFTFEELATK

SEQ ID NO: 280346 - protein, 15 aa, Artificial Sequence
  Description of Artificial Sequence: Synthetic peptide
  Seed: HIHIFSFTGEEMATK
HIHKFSFTFEEVATK

SEQ ID NO: 280347 - protein, 15 aa, Artificial Sequence
  Description of Artificial Sequence: Synthetic peptide
  Seed: HIHIFSFTGEEMATK
HIHKFSITFEEFATK

SEQ ID NO: 280348 - protein, 15 aa, Artificial Sequence
  Description of Artificial Sequence: Synthetic peptide
  Seed: HIHIFSFTGEEMATK
HIHKFSITFEEIATK

SEQ ID NO: 280349 - protein, 15 aa, Artificial Sequence
  Description of Artificial Sequence: Synthetic peptide
  Seed: HIHIFSFTGEEMATK
HIHKFSITFEELATK

SEQ ID NO: 280350 - protein, 15 aa, Artificial Sequence
  Description of Artificial Sequence: Synthetic peptide
  Seed: HIHIFSFTGEEMATK
HIHKFSITFEEVATK

SEQ ID NO: 280351 - protein, 15 aa, Artificial Sequence
  Description of Artificial Sequence: Synthetic peptide
  Seed: HIHIFSFTGEEMATK
HIHKFSLTFEEFATK

SEQ ID NO: 280352 - protein, 15 aa, Artificial Sequence
  Description of Artificial Sequence: Synthetic peptide
  Seed: HIHIFSFTGEEMATK
HIHKFSLTFEEIATK

SEQ ID NO: 280353 - protein, 15 aa, Artificial Sequence
  Description of Artificial Sequence: Synthetic peptide
  Seed: HIHIFSFTGEEMATK
HIHKFSLTFEELATK

SEQ ID NO: 280354 - protein, 15 aa, Artificial Sequence
  Description of Artificial Sequence: Synthetic peptide
  Seed: HIHIFSFTGEEMATK
HIHKFSLTFEEVATK

SEQ ID NO: 280355 - protein, 15 aa, Artificial Sequence
  Description of Artificial Sequence: Synthetic peptide
  Seed: HIHIFSFTGEEMATK
HIHKFSSTFEEIATK

SEQ ID NO: 280356 - protein, 15 aa, Artificial Sequence
  Description of Artificial Sequence: Synthetic peptide
  Seed: HIHIFSFTGEEMATK
HIHKFSSTFEELATK

SEQ ID NO: 280357 - protein, 15 aa, Artificial Sequence
  Description of Artificial Sequence: Synthetic peptide
  Seed: HIHIFSFTGEEMATK
HIHKFSTTFEEIATK

SEQ ID NO: 280358 - protein, 15 aa, Artificial Sequence
  Description of Artificial Sequence: Synthetic peptide
  Seed: HIHIFSFTGEEMATK
HIHKFSTTFEELATK

SEQ ID NO: 280359 - protein, 15 aa, Artificial Sequence
  Description of Artificial Sequence: Synthetic peptide
  Seed: HIHIFSFTGEEMATK
HIHKFSTTFEEVATK

SEQ ID NO: 280360 - protein, 15 aa, Artificial Sequence
  Description of Artificial Sequence: Synthetic peptide
  Seed: HIHIFSFTGEEMATK
HIHKFSVTFEEIATK

SEQ ID NO: 280361 - protein, 15 aa, Artificial Sequence
  Description of Artificial Sequence: Synthetic peptide
  Seed: HIHIFSFTGEEMATK
HIHKFSVTFEELATK

SEQ ID NO: 280362 - protein, 15 aa, Artificial Sequence
  Description of Artificial Sequence: Synthetic peptide
  Seed: HIHIFSFTGEEMATK
HIHKFSVTFEEVATK

SEQ ID NO: 280363 - protein, 15 aa, Artificial Sequence
  Description of Artificial Sequence: Synthetic peptide
  Seed: HIHIFSFTGEEMATK
HIHLFSATAEEAATK

SEQ ID NO: 280364 - protein, 15 aa, Artificial Sequence
  Description of Artificial Sequence: Synthetic peptide
  Seed: HIHIFSFTGEEMATK
HIHLFSATAEEIATK

SEQ ID NO: 280365 - protein, 15 aa, Artificial Sequence
  Description of Artificial Sequence: Synthetic peptide
  Seed: HIHIFSFTGEEMATK
HIHLFSATAEELATK

SEQ ID NO: 280366 - protein, 15 aa, Artificial Sequence
  Description of Artificial Sequence: Synthetic peptide
  Seed: HIHIFSFTGEEMATK
HIHLFSATAEEVATK

SEQ ID NO: 280367 - protein, 15 aa, Artificial Sequence
  Description of Artificial Sequence: Synthetic peptide
  Seed: HIHIFSFTGEEMATK
HIHLFSATFEEAATK

SEQ ID NO: 280368 - protein, 15 aa, Artificial Sequence
  Description of Artificial Sequence: Synthetic peptide
  Seed: HIHIFSFTGEEMATK
HIHLFSATFEEDATK

SEQ ID NO: 280369 - protein, 15 aa, Artificial Sequence
  Description of Artificial Sequence: Synthetic peptide
  Seed: HIHIFSFTGEEMATK
HIHLFSATFEEEATK

SEQ ID NO: 280370 - protein, 15 aa, Artificial Sequence
  Description of Artificial Sequence: Synthetic peptide
  Seed: HIHIFSFTGEEMATK
HIHLFSATFEEFATK

SEQ ID NO: 280371 - protein, 15 aa, Artificial Sequence
  Description of Artificial Sequence: Synthetic peptide
  Seed: HIHIFSFTGEEMATK
HIHLFSATFEEHATK

SEQ ID NO: 280372 - protein, 15 aa, Artificial Sequence
  Description of Artificial Sequence: Synthetic peptide
  Seed: HIHIFSFTGEEMATK
HIHLFSATFEEIATK

SEQ ID NO: 280373 - protein, 15 aa, Artificial Sequence
  Description of Artificial Sequence: Synthetic peptide
  Seed: HIHIFSFTGEEMATK
HIHLFSATFEELATK

SEQ ID NO: 280374 - protein, 15 aa, Artificial Sequence
  Description of Artificial Sequence: Synthetic peptide
  Seed: HIHIFSFTGEEMATK
HIHLFSATFEEMATK

SEQ ID NO: 280375 - protein, 15 aa, Artificial Sequence
  Description of Artificial Sequence: Synthetic peptide
  Seed: HIHIFSFTGEEMATK
HIHLFSATFEENATK

SEQ ID NO: 280376 - protein, 15 aa, Artificial Sequence
  Description of Artificial Sequence: Synthetic peptide
  Seed: HIHIFSFTGEEMATK
HIHLFSATFEEPATK

SEQ ID NO: 280377 - protein, 15 aa, Artificial Sequence
  Description of Artificial Sequence: Synthetic peptide
  Seed: HIHIFSFTGEEMATK
HIHLFSATFEEQATK

SEQ ID NO: 280378 - protein, 15 aa, Artificial Sequence
  Description of Artificial Sequence: Synthetic peptide
  Seed: HIHIFSFTGEEMATK
HIHLFSATFEERATK

SEQ ID NO: 280379 - protein, 15 aa, Artificial Sequence
  Description of Artificial Sequence: Synthetic peptide
  Seed: HIHIFSFTGEEMATK
HIHLFSATFEESATK

SEQ ID NO: 280380 - protein, 15 aa, Artificial Sequence
  Description of Artificial Sequence: Synthetic peptide
  Seed: HIHIFSFTGEEMATK
HIHLFSATFEETATK

SEQ ID NO: 280381 - protein, 15 aa, Artificial Sequence
  Description of Artificial Sequence: Synthetic peptide
  Seed: HIHIFSFTGEEMATK
HIHLFSATFEEVATK

SEQ ID NO: 280382 - protein, 15 aa, Artificial Sequence
  Description of Artificial Sequence: Synthetic peptide
  Seed: HIHIFSFTGEEMATK
HIHLFSATFEEWATK

SEQ ID NO: 280383 - protein, 15 aa, Artificial Sequence
  Description of Artificial Sequence: Synthetic peptide
  Seed: HIHIFSFTGEEMATK
HIHLFSATFEEYATK

SEQ ID NO: 280384 - protein, 15 aa, Artificial Sequence
  Description of Artificial Sequence: Synthetic peptide
  Seed: HIHIFSFTGEEMATK
HIHLFSATGEELATK

SEQ ID NO: 280385 - protein, 15 aa, Artificial Sequence
  Description of Artificial Sequence: Synthetic peptide
  Seed: HIHIFSFTGEEMATK
HIHLFSATGEEVATK

SEQ ID NO: 280386 - protein, 15 aa, Artificial Sequence
  Description of Artificial Sequence: Synthetic peptide
  Seed: HIHIFSFTGEEMATK
HIHLFSATIEEIATK

SEQ ID NO: 280387 - protein, 15 aa, Artificial Sequence
  Description of Artificial Sequence: Synthetic peptide
  Seed: HIHIFSFTGEEMATK
HIHLFSATIEELATK

SEQ ID NO: 280388 - protein, 15 aa, Artificial Sequence
  Description of Artificial Sequence: Synthetic peptide
  Seed: HIHIFSFTGEEMATK
HIHLFSATLEEFATK

SEQ ID NO: 280389 - protein, 15 aa, Artificial Sequence
  Description of Artificial Sequence: Synthetic peptide
  Seed: HIHIFSFTGEEMATK
HIHLFSATLEEIATK

SEQ ID NO: 280390 - protein, 15 aa, Artificial Sequence
  Description of Artificial Sequence: Synthetic peptide
  Seed: HIHIFSFTGEEMATK
HIHLFSATLEELATK

SEQ ID NO: 280391 - protein, 15 aa, Artificial Sequence
  Description of Artificial Sequence: Synthetic peptide
  Seed: HIHIFSFTGEEMATK
HIHLFSATLEEMATK

SEQ ID NO: 280392 - protein, 15 aa, Artificial Sequence
  Description of Artificial Sequence: Synthetic peptide
  Seed: HIHIFSFTGEEMATK
HIHLFSATLEEVATK

SEQ ID NO: 280393 - protein, 15 aa, Artificial Sequence
  Description of Artificial Sequence: Synthetic peptide
  Seed: HIHIFSFTGEEMATK
HIHLFSATMEEIATK

SEQ ID NO: 280394 - protein, 15 aa, Artificial Sequence
  Description of Artificial Sequence: Synthetic peptide
  Seed: HIHIFSFTGEEMATK
HIHLFSATMEELATK

SEQ ID NO: 280395 - protein, 15 aa, Artificial Sequence
  Description of Artificial Sequence: Synthetic peptide
  Seed: HIHIFSFTGEEMATK
HIHLFSATSEELATK

SEQ ID NO: 280396 - protein, 15 aa, Artificial Sequence
  Description of Artificial Sequence: Synthetic peptide
  Seed: HIHIFSFTGEEMATK
HIHLFSATSEEVATK

SEQ ID NO: 280397 - protein, 15 aa, Artificial Sequence
  Description of Artificial Sequence: Synthetic peptide
  Seed: HIHIFSFTGEEMATK
HIHLFSATWEEFATK

SEQ ID NO: 280398 - protein, 15 aa, Artificial Sequence
  Description of Artificial Sequence: Synthetic peptide
  Seed: HIHIFSFTGEEMATK
HIHLFSATWEEIATK

SEQ ID NO: 280399 - protein, 15 aa, Artificial Sequence
  Description of Artificial Sequence: Synthetic peptide
  Seed: HIHIFSFTGEEMATK
HIHLFSATWEELATK

SEQ ID NO: 280400 - protein, 15 aa, Artificial Sequence
  Description of Artificial Sequence: Synthetic peptide
  Seed: HIHIFSFTGEEMATK
HIHLFSATWEEMATK

SEQ ID NO: 280401 - protein, 15 aa, Artificial Sequence
  Description of Artificial Sequence: Synthetic peptide
  Seed: HIHIFSFTGEEMATK
HIHLFSATWEEVATK

SEQ ID NO: 280402 - protein, 15 aa, Artificial Sequence
  Description of Artificial Sequence: Synthetic peptide
  Seed: HIHIFSFTGEEMATK
HIHLFSATYEEFATK

SEQ ID NO: 280403 - protein, 15 aa, Artificial Sequence
  Description of Artificial Sequence: Synthetic peptide
  Seed: HIHIFSFTGEEMATK
HIHLFSATYEEIATK

SEQ ID NO: 280404 - protein, 15 aa, Artificial Sequence
  Description of Artificial Sequence: Synthetic peptide
  Seed: HIHIFSFTGEEMATK
HIHLFSATYEELATK

SEQ ID NO: 280405 - protein, 15 aa, Artificial Sequence
  Description of Artificial Sequence: Synthetic peptide
  Seed: HIHIFSFTGEEMATK
HIHLFSATYEEMATK

SEQ ID NO: 280406 - protein, 15 aa, Artificial Sequence
  Description of Artificial Sequence: Synthetic peptide
  Seed: HIHIFSFTGEEMATK
HIHLFSATYEEVATK

SEQ ID NO: 280407 - protein, 15 aa, Artificial Sequence
  Description of Artificial Sequence: Synthetic peptide
  Seed: HIHIFSFTGEEMATK
HIHLFSCTFEEFATK

SEQ ID NO: 280408 - protein, 15 aa, Artificial Sequence
  Description of Artificial Sequence: Synthetic peptide
  Seed: HIHIFSFTGEEMATK
HIHLFSCTFEEIATK

SEQ ID NO: 280409 - protein, 15 aa, Artificial Sequence
  Description of Artificial Sequence: Synthetic peptide
  Seed: HIHIFSFTGEEMATK
HIHLFSCTFEELATK

SEQ ID NO: 280410 - protein, 15 aa, Artificial Sequence
  Description of Artificial Sequence: Synthetic peptide
  Seed: HIHIFSFTGEEMATK
HIHLFSCTFEEMATK

SEQ ID NO: 280411 - protein, 15 aa, Artificial Sequence
  Description of Artificial Sequence: Synthetic peptide
  Seed: HIHIFSFTGEEMATK
HIHLFSCTFEEVATK

SEQ ID NO: 280412 - protein, 15 aa, Artificial Sequence
  Description of Artificial Sequence: Synthetic peptide
  Seed: HIHIFSFTGEEMATK
HIHLFSCTFEEYATK

SEQ ID NO: 280413 - protein, 15 aa, Artificial Sequence
  Description of Artificial Sequence: Synthetic peptide
  Seed: HIHIFSFTGEEMATK
HIHLFSDTFEEFATK

SEQ ID NO: 280414 - protein, 15 aa, Artificial Sequence
  Description of Artificial Sequence: Synthetic peptide
  Seed: HIHIFSFTGEEMATK
HIHLFSDTFEEIATK

SEQ ID NO: 280415 - protein, 15 aa, Artificial Sequence
  Description of Artificial Sequence: Synthetic peptide
  Seed: HIHIFSFTGEEMATK
HIHLFSDTFEELATK

SEQ ID NO: 280416 - protein, 15 aa, Artificial Sequence
  Description of Artificial Sequence: Synthetic peptide
  Seed: HIHIFSFTGEEMATK
HIHLFSDTFEEMATK

SEQ ID NO: 280417 - protein, 15 aa, Artificial Sequence
  Description of Artificial Sequence: Synthetic peptide
  Seed: HIHIFSFTGEEMATK
HIHLFSDTFEEVATK

SEQ ID NO: 280418 - protein, 15 aa, Artificial Sequence
  Description of Artificial Sequence: Synthetic peptide
  Seed: HIHIFSFTGEEMATK
HIHLFSETFEEAATK

SEQ ID NO: 280419 - protein, 15 aa, Artificial Sequence
  Description of Artificial Sequence: Synthetic peptide
  Seed: HIHIFSFTGEEMATK
HIHLFSETFEEEATK

SEQ ID NO: 280420 - protein, 15 aa, Artificial Sequence
  Description of Artificial Sequence: Synthetic peptide
  Seed: HIHIFSFTGEEMATK
HIHLFSETFEEFATK

SEQ ID NO: 280421 - protein, 15 aa, Artificial Sequence
  Description of Artificial Sequence: Synthetic peptide
  Seed: HIHIFSFTGEEMATK
HIHLFSETFEEIATK

SEQ ID NO: 280422 - protein, 15 aa, Artificial Sequence
  Description of Artificial Sequence: Synthetic peptide
  Seed: HIHIFSFTGEEMATK
HIHLFSETFEELATK

SEQ ID NO: 280423 - protein, 15 aa, Artificial Sequence
  Description of Artificial Sequence: Synthetic peptide
  Seed: HIHIFSFTGEEMATK
HIHLFSETFEEMATK

SEQ ID NO: 280424 - protein, 15 aa, Artificial Sequence
  Description of Artificial Sequence: Synthetic peptide
  Seed: HIHIFSFTGEEMATK
HIHLFSETFEESATK

SEQ ID NO: 280425 - protein, 15 aa, Artificial Sequence
  Description of Artificial Sequence: Synthetic peptide
  Seed: HIHIFSFTGEEMATK
HIHLFSETFEETATK

SEQ ID NO: 280426 - protein, 15 aa, Artificial Sequence
  Description of Artificial Sequence: Synthetic peptide
  Seed: HIHIFSFTGEEMATK
HIHLFSETFEEVATK

SEQ ID NO: 280427 - protein, 15 aa, Artificial Sequence
  Description of Artificial Sequence: Synthetic peptide
  Seed: HIHIFSFTGEEMATK
HIHLFSETFEEWATK

SEQ ID NO: 280428 - protein, 15 aa, Artificial Sequence
  Description of Artificial Sequence: Synthetic peptide
  Seed: HIHIFSFTGEEMATK
HIHLFSETFEEYATK

SEQ ID NO: 280429 - protein, 15 aa, Artificial Sequence
  Description of Artificial Sequence: Synthetic peptide
  Seed: HIHIFSFTGEEMATK
HIHLFSETLEEIATK

SEQ ID NO: 280430 - protein, 15 aa, Artificial Sequence
  Description of Artificial Sequence: Synthetic peptide
  Seed: HIHIFSFTGEEMATK
HIHLFSETLEELATK

SEQ ID NO: 280431 - protein, 15 aa, Artificial Sequence
  Description of Artificial Sequence: Synthetic peptide
  Seed: HIHIFSFTGEEMATK
HIHLFSETWEEIATK

SEQ ID NO: 280432 - protein, 15 aa, Artificial Sequence
  Description of Artificial Sequence: Synthetic peptide
  Seed: HIHIFSFTGEEMATK
HIHLFSETWEELATK

SEQ ID NO: 280433 - protein, 15 aa, Artificial Sequence
  Description of Artificial Sequence: Synthetic peptide
  Seed: HIHIFSFTGEEMATK
HIHLFSETYEEIATK

SEQ ID NO: 280434 - protein, 15 aa, Artificial Sequence
  Description of Artificial Sequence: Synthetic peptide
  Seed: HIHIFSFTGEEMATK
HIHLFSETYEELATK

SEQ ID NO: 280435 - protein, 15 aa, Artificial Sequence
  Description of Artificial Sequence: Synthetic peptide
  Seed: HIHIFSFTGEEMATK
HIHLFSETYEEVATK

SEQ ID NO: 280436 - protein, 15 aa, Artificial Sequence
  Description of Artificial Sequence: Synthetic peptide
  Seed: HIHIFSFTGEEMATK
HIHLFSFTAEEFATK

SEQ ID NO: 280437 - protein, 15 aa, Artificial Sequence
  Description of Artificial Sequence: Synthetic peptide
  Seed: HIHIFSFTGEEMATK
HIHLFSFTAEEIATK

SEQ ID NO: 280438 - protein, 15 aa, Artificial Sequence
  Description of Artificial Sequence: Synthetic peptide
  Seed: HIHIFSFTGEEMATK
HIHLFSFTAEELATK

SEQ ID NO: 280439 - protein, 15 aa, Artificial Sequence
  Description of Artificial Sequence: Synthetic peptide
  Seed: HIHIFSFTGEEMATK
HIHLFSFTFEEAATK

SEQ ID NO: 280440 - protein, 15 aa, Artificial Sequence
  Description of Artificial Sequence: Synthetic peptide
  Seed: HIHIFSFTGEEMATK
HIHLFSFTFEEDATK

SEQ ID NO: 280441 - protein, 15 aa, Artificial Sequence
  Description of Artificial Sequence: Synthetic peptide
  Seed: HIHIFSFTGEEMATK
HIHLFSFTFEEEATK

SEQ ID NO: 280442 - protein, 15 aa, Artificial Sequence
  Description of Artificial Sequence: Synthetic peptide
  Seed: HIHIFSFTGEEMATK
HIHLFSFTFEEFATK

SEQ ID NO: 280443 - protein, 15 aa, Artificial Sequence
  Description of Artificial Sequence: Synthetic peptide
  Seed: HIHIFSFTGEEMATK
HIHLFSFTFEEHATK

SEQ ID NO: 280444 - protein, 15 aa, Artificial Sequence
  Description of Artificial Sequence: Synthetic peptide
  Seed: HIHIFSFTGEEMATK
HIHLFSFTFEEIATK

SEQ ID NO: 280445 - protein, 15 aa, Artificial Sequence
  Description of Artificial Sequence: Synthetic peptide
  Seed: HIHIFSFTGEEMATK
HIHLFSFTFEEKATK

SEQ ID NO: 280446 - protein, 15 aa, Artificial Sequence
  Description of Artificial Sequence: Synthetic peptide
  Seed: HIHIFSFTGEEMATK
HIHLFSFTFEELATK

SEQ ID NO: 280447 - protein, 15 aa, Artificial Sequence
  Description of Artificial Sequence: Synthetic peptide
  Seed: HIHIFSFTGEEMATK
HIHLFSFTFEEMATK

SEQ ID NO: 280448 - protein, 15 aa, Artificial Sequence
  Description of Artificial Sequence: Synthetic peptide
  Seed: HIHIFSFTGEEMATK
HIHLFSFTFEENATK

SEQ ID NO: 280449 - protein, 15 aa, Artificial Sequence
  Description of Artificial Sequence: Synthetic peptide
  Seed: HIHIFSFTGEEMATK
HIHLFSFTFEEPATK

SEQ ID NO: 280450 - protein, 15 aa, Artificial Sequence
  Description of Artificial Sequence: Synthetic peptide
  Seed: HIHIFSFTGEEMATK
HIHLFSFTFEEQATK

SEQ ID NO: 280451 - protein, 15 aa, Artificial Sequence
  Description of Artificial Sequence: Synthetic peptide
  Seed: HIHIFSFTGEEMATK
HIHLFSFTFEERATK

SEQ ID NO: 280452 - protein, 15 aa, Artificial Sequence
  Description of Artificial Sequence: Synthetic peptide
  Seed: HIHIFSFTGEEMATK
HIHLFSFTFEESATK

SEQ ID NO: 280453 - protein, 15 aa, Artificial Sequence
  Description of Artificial Sequence: Synthetic peptide
  Seed: HIHIFSFTGEEMATK
HIHLFSFTFEETATK

SEQ ID NO: 280454 - protein, 15 aa, Artificial Sequence
  Description of Artificial Sequence: Synthetic peptide
  Seed: HIHIFSFTGEEMATK
HIHLFSFTFEEVATK

SEQ ID NO: 280455 - protein, 15 aa, Artificial Sequence
  Description of Artificial Sequence: Synthetic peptide
  Seed: HIHIFSFTGEEMATK
HIHLFSFTFEEYATK

SEQ ID NO: 280456 - protein, 15 aa, Artificial Sequence
  Description of Artificial Sequence: Synthetic peptide
  Seed: HIHIFSFTGEEMATK
HIHLFSFTIEEFATK

SEQ ID NO: 280457 - protein, 15 aa, Artificial Sequence
  Description of Artificial Sequence: Synthetic peptide
  Seed: HIHIFSFTGEEMATK
HIHLFSFTIEEIATK

SEQ ID NO: 280458 - protein, 15 aa, Artificial Sequence
  Description of Artificial Sequence: Synthetic peptide
  Seed: HIHIFSFTGEEMATK
HIHLFSFTIEELATK

SEQ ID NO: 280459 - protein, 15 aa, Artificial Sequence
  Description of Artificial Sequence: Synthetic peptide
  Seed: HIHIFSFTGEEMATK
HIHLFSFTIEEMATK

SEQ ID NO: 280460 - protein, 15 aa, Artificial Sequence
  Description of Artificial Sequence: Synthetic peptide
  Seed: HIHIFSFTGEEMATK
HIHLFSFTIEEVATK

SEQ ID NO: 280461 - protein, 15 aa, Artificial Sequence
  Description of Artificial Sequence: Synthetic peptide
  Seed: HIHIFSFTGEEMATK
HIHLFSFTIEEYATK

SEQ ID NO: 280462 - protein, 15 aa, Artificial Sequence
  Description of Artificial Sequence: Synthetic peptide
  Seed: HIHIFSFTGEEMATK
HIHLFSFTLEEAATK

SEQ ID NO: 280463 - protein, 15 aa, Artificial Sequence
  Description of Artificial Sequence: Synthetic peptide
  Seed: HIHIFSFTGEEMATK
HIHLFSFTLEEFATK

SEQ ID NO: 280464 - protein, 15 aa, Artificial Sequence
  Description of Artificial Sequence: Synthetic peptide
  Seed: HIHIFSFTGEEMATK
HIHLFSFTLEEIATK

SEQ ID NO: 280465 - protein, 15 aa, Artificial Sequence
  Description of Artificial Sequence: Synthetic peptide
  Seed: HIHIFSFTGEEMATK
HIHLFSFTLEELATK

SEQ ID NO: 280466 - protein, 15 aa, Artificial Sequence
  Description of Artificial Sequence: Synthetic peptide
  Seed: HIHIFSFTGEEMATK
HIHLFSFTLEEMATK

SEQ ID NO: 280467 - protein, 15 aa, Artificial Sequence
  Description of Artificial Sequence: Synthetic peptide
  Seed: HIHIFSFTGEEMATK
HIHLFSFTLEERATK

SEQ ID NO: 280468 - protein, 15 aa, Artificial Sequence
  Description of Artificial Sequence: Synthetic peptide
  Seed: HIHIFSFTGEEMATK
HIHLFSFTLEESATK

SEQ ID NO: 280469 - protein, 15 aa, Artificial Sequence
  Description of Artificial Sequence: Synthetic peptide
  Seed: HIHIFSFTGEEMATK
HIHLFSFTLEETATK

SEQ ID NO: 280470 - protein, 15 aa, Artificial Sequence
  Description of Artificial Sequence: Synthetic peptide
  Seed: HIHIFSFTGEEMATK
HIHLFSFTLEEVATK

SEQ ID NO: 280471 - protein, 15 aa, Artificial Sequence
  Description of Artificial Sequence: Synthetic peptide
  Seed: HIHIFSFTGEEMATK
HIHLFSFTLEEYATK

SEQ ID NO: 280472 - protein, 15 aa, Artificial Sequence
  Description of Artificial Sequence: Synthetic peptide
  Seed: HIHIFSFTGEEMATK
HIHLFSFTMEEFATK

SEQ ID NO: 280473 - protein, 15 aa, Artificial Sequence
  Description of Artificial Sequence: Synthetic peptide
  Seed: HIHIFSFTGEEMATK
HIHLFSFTMEEIATK

SEQ ID NO: 280474 - protein, 15 aa, Artificial Sequence
  Description of Artificial Sequence: Synthetic peptide
  Seed: HIHIFSFTGEEMATK
HIHLFSFTMEELATK

SEQ ID NO: 280475 - protein, 15 aa, Artificial Sequence
  Description of Artificial Sequence: Synthetic peptide
  Seed: HIHIFSFTGEEMATK
HIHLFSFTMEEMATK

SEQ ID NO: 280476 - protein, 15 aa, Artificial Sequence
  Description of Artificial Sequence: Synthetic peptide
  Seed: HIHIFSFTGEEMATK
HIHLFSFTMEEVATK

SEQ ID NO: 280477 - protein, 15 aa, Artificial Sequence
  Description of Artificial Sequence: Synthetic peptide
  Seed: HIHIFSFTGEEMATK
HIHLFSFTMEEYATK

SEQ ID NO: 280478 - protein, 15 aa, Artificial Sequence
  Description of Artificial Sequence: Synthetic peptide
  Seed: HIHIFSFTGEEMATK
HIHLFSFTVEEFATK

SEQ ID NO: 280479 - protein, 15 aa, Artificial Sequence
  Description of Artificial Sequence: Synthetic peptide
  Seed: HIHIFSFTGEEMATK
HIHLFSFTVEEIATK

SEQ ID NO: 280480 - protein, 15 aa, Artificial Sequence
  Description of Artificial Sequence: Synthetic peptide
  Seed: HIHIFSFTGEEMATK
HIHLFSFTVEELATK

SEQ ID NO: 280481 - protein, 15 aa, Artificial Sequence
  Description of Artificial Sequence: Synthetic peptide
  Seed: HIHIFSFTGEEMATK
HIHLFSFTVEEVATK

SEQ ID NO: 280482 - protein, 15 aa, Artificial Sequence
  Description of Artificial Sequence: Synthetic peptide
  Seed: HIHIFSFTGEEMATK
HIHLFSFTWEEFATK

SEQ ID NO: 280483 - protein, 15 aa, Artificial Sequence
  Description of Artificial Sequence: Synthetic peptide
  Seed: HIHIFSFTGEEMATK
HIHLFSFTWEEIATK

SEQ ID NO: 280484 - protein, 15 aa, Artificial Sequence
  Description of Artificial Sequence: Synthetic peptide
  Seed: HIHIFSFTGEEMATK
HIHLFSFTWEELATK

SEQ ID NO: 280485 - protein, 15 aa, Artificial Sequence
  Description of Artificial Sequence: Synthetic peptide
  Seed: HIHIFSFTGEEMATK
HIHLFSFTWEEMATK

SEQ ID NO: 280486 - protein, 15 aa, Artificial Sequence
  Description of Artificial Sequence: Synthetic peptide
  Seed: HIHIFSFTGEEMATK
HIHLFSFTWEETATK

SEQ ID NO: 280487 - protein, 15 aa, Artificial Sequence
  Description of Artificial Sequence: Synthetic peptide
  Seed: HIHIFSFTGEEMATK
HIHLFSFTWEEVATK

SEQ ID NO: 280488 - protein, 15 aa, Artificial Sequence
  Description of Artificial Sequence: Synthetic peptide
  Seed: HIHIFSFTGEEMATK
HIHLFSFTWEEYATK

SEQ ID NO: 280489 - protein, 15 aa, Artificial Sequence
  Description of Artificial Sequence: Synthetic peptide
  Seed: HIHIFSFTGEEMATK
HIHLFSFTYEEAATK

SEQ ID NO: 280490 - protein, 15 aa, Artificial Sequence
  Description of Artificial Sequence: Synthetic peptide
  Seed: HIHIFSFTGEEMATK
HIHLFSFTYEEFATK

SEQ ID NO: 280491 - protein, 15 aa, Artificial Sequence
  Description of Artificial Sequence: Synthetic peptide
  Seed: HIHIFSFTGEEMATK
HIHLFSFTYEEIATK

SEQ ID NO: 280492 - protein, 15 aa, Artificial Sequence
  Description of Artificial Sequence: Synthetic peptide
  Seed: HIHIFSFTGEEMATK
HIHLFSFTYEELATK

SEQ ID NO: 280493 - protein, 15 aa, Artificial Sequence
  Description of Artificial Sequence: Synthetic peptide
  Seed: HIHIFSFTGEEMATK
HIHLFSFTYEEMATK

SEQ ID NO: 280494 - protein, 15 aa, Artificial Sequence
  Description of Artificial Sequence: Synthetic peptide
  Seed: HIHIFSFTGEEMATK
HIHLFSFTYEESATK

SEQ ID NO: 280495 - protein, 15 aa, Artificial Sequence
  Description of Artificial Sequence: Synthetic peptide
  Seed: HIHIFSFTGEEMATK
HIHLFSFTYEETATK

SEQ ID NO: 280496 - protein, 15 aa, Artificial Sequence
  Description of Artificial Sequence: Synthetic peptide
  Seed: HIHIFSFTGEEMATK
HIHLFSFTYEEVATK

SEQ ID NO: 280497 - protein, 15 aa, Artificial Sequence
  Description of Artificial Sequence: Synthetic peptide
  Seed: HIHIFSFTGEEMATK
HIHLFSFTYEEYATK

SEQ ID NO: 280498 - protein, 15 aa, Artificial Sequence
  Description of Artificial Sequence: Synthetic peptide
  Seed: HIHIFSFTGEEMATK
HIHLFSGTFEEFATK

SEQ ID NO: 280499 - protein, 15 aa, Artificial Sequence
  Description of Artificial Sequence: Synthetic peptide
  Seed: HIHIFSFTGEEMATK
HIHLFSGTFEEIATK

SEQ ID NO: 280500 - protein, 15 aa, Artificial Sequence
  Description of Artificial Sequence: Synthetic peptide
  Seed: HIHIFSFTGEEMATK
HIHLFSGTFEELATK

SEQ ID NO: 280501 - protein, 15 aa, Artificial Sequence
  Description of Artificial Sequence: Synthetic peptide
  Seed: HIHIFSFTGEEMATK
HIHLFSGTFEEMATK

SEQ ID NO: 280502 - protein, 15 aa, Artificial Sequence
  Description of Artificial Sequence: Synthetic peptide
  Seed: HIHIFSFTGEEMATK
HIHLFSGTFEEVATK

SEQ ID NO: 280503 - protein, 15 aa, Artificial Sequence
  Description of Artificial Sequence: Synthetic peptide
  Seed: HIHIFSFTGEEMATK
HIHLFSHTFEEAATK

SEQ ID NO: 280504 - protein, 15 aa, Artificial Sequence
  Description of Artificial Sequence: Synthetic peptide
  Seed: HIHIFSFTGEEMATK
HIHLFSHTFEEDATK

SEQ ID NO: 280505 - protein, 15 aa, Artificial Sequence
  Description of Artificial Sequence: Synthetic peptide
  Seed: HIHIFSFTGEEMATK
HIHLFSHTFEEEATK

SEQ ID NO: 280506 - protein, 15 aa, Artificial Sequence
  Description of Artificial Sequence: Synthetic peptide
  Seed: HIHIFSFTGEEMATK
HIHLFSHTFEEFATK

SEQ ID NO: 280507 - protein, 15 aa, Artificial Sequence
  Description of Artificial Sequence: Synthetic peptide
  Seed: HIHIFSFTGEEMATK
HIHLFSHTFEEHATK

SEQ ID NO: 280508 - protein, 15 aa, Artificial Sequence
  Description of Artificial Sequence: Synthetic peptide
  Seed: HIHIFSFTGEEMATK
HIHLFSHTFEEIATK

SEQ ID NO: 280509 - protein, 15 aa, Artificial Sequence
  Description of Artificial Sequence: Synthetic peptide
  Seed: HIHIFSFTGEEMATK
HIHLFSHTFEELATK

SEQ ID NO: 280510 - protein, 15 aa, Artificial Sequence
  Description of Artificial Sequence: Synthetic peptide
  Seed: HIHIFSFTGEEMATK
HIHLFSHTFEEMATK

SEQ ID NO: 280511 - protein, 15 aa, Artificial Sequence
  Description of Artificial Sequence: Synthetic peptide
  Seed: HIHIFSFTGEEMATK
HIHLFSHTFEENATK

SEQ ID NO: 280512 - protein, 15 aa, Artificial Sequence
  Description of Artificial Sequence: Synthetic peptide
  Seed: HIHIFSFTGEEMATK
HIHLFSHTFEEQATK

SEQ ID NO: 280513 - protein, 15 aa, Artificial Sequence
  Description of Artificial Sequence: Synthetic peptide
  Seed: HIHIFSFTGEEMATK
HIHLFSHTFEESATK

SEQ ID NO: 280514 - protein, 15 aa, Artificial Sequence
  Description of Artificial Sequence: Synthetic peptide
  Seed: HIHIFSFTGEEMATK
HIHLFSHTFEETATK

SEQ ID NO: 280515 - protein, 15 aa, Artificial Sequence
  Description of Artificial Sequence: Synthetic peptide
  Seed: HIHIFSFTGEEMATK
HIHLFSHTFEEVATK

SEQ ID NO: 280516 - protein, 15 aa, Artificial Sequence
  Description of Artificial Sequence: Synthetic peptide
  Seed: HIHIFSFTGEEMATK
HIHLFSHTFEEWATK

SEQ ID NO: 280517 - protein, 15 aa, Artificial Sequence
  Description of Artificial Sequence: Synthetic peptide
  Seed: HIHIFSFTGEEMATK
HIHLFSHTFEEYATK

SEQ ID NO: 280518 - protein, 15 aa, Artificial Sequence
  Description of Artificial Sequence: Synthetic peptide
  Seed: HIHIFSFTGEEMATK
HIHLFSHTIEEIATK

SEQ ID NO: 280519 - protein, 15 aa, Artificial Sequence
  Description of Artificial Sequence: Synthetic peptide
  Seed: HIHIFSFTGEEMATK
HIHLFSHTIEELATK

SEQ ID NO: 280520 - protein, 15 aa, Artificial Sequence
  Description of Artificial Sequence: Synthetic peptide
  Seed: HIHIFSFTGEEMATK
HIHLFSHTIEEVATK

SEQ ID NO: 280521 - protein, 15 aa, Artificial Sequence
  Description of Artificial Sequence: Synthetic peptide
  Seed: HIHIFSFTGEEMATK
HIHLFSHTLEEFATK

SEQ ID NO: 280522 - protein, 15 aa, Artificial Sequence
  Description of Artificial Sequence: Synthetic peptide
  Seed: HIHIFSFTGEEMATK
HIHLFSHTLEEIATK

SEQ ID NO: 280523 - protein, 15 aa, Artificial Sequence
  Description of Artificial Sequence: Synthetic peptide
  Seed: HIHIFSFTGEEMATK
HIHLFSHTLEELATK

SEQ ID NO: 280524 - protein, 15 aa, Artificial Sequence
  Description of Artificial Sequence: Synthetic peptide
  Seed: HIHIFSFTGEEMATK
HIHLFSHTLEEMATK

SEQ ID NO: 280525 - protein, 15 aa, Artificial Sequence
  Description of Artificial Sequence: Synthetic peptide
  Seed: HIHIFSFTGEEMATK
HIHLFSHTLEEVATK

SEQ ID NO: 280526 - protein, 15 aa, Artificial Sequence
  Description of Artificial Sequence: Synthetic peptide
  Seed: HIHIFSFTGEEMATK
HIHLFSHTMEEIATK

SEQ ID NO: 280527 - protein, 15 aa, Artificial Sequence
  Description of Artificial Sequence: Synthetic peptide
  Seed: HIHIFSFTGEEMATK
HIHLFSHTMEELATK

SEQ ID NO: 280528 - protein, 15 aa, Artificial Sequence
  Description of Artificial Sequence: Synthetic peptide
  Seed: HIHIFSFTGEEMATK
HIHLFSHTMEEVATK

SEQ ID NO: 280529 - protein, 15 aa, Artificial Sequence
  Description of Artificial Sequence: Synthetic peptide
  Seed: HIHIFSFTGEEMATK
HIHLFSHTWEEFATK

SEQ ID NO: 280530 - protein, 15 aa, Artificial Sequence
  Description of Artificial Sequence: Synthetic peptide
  Seed: HIHIFSFTGEEMATK
HIHLFSHTWEEIATK

SEQ ID NO: 280531 - protein, 15 aa, Artificial Sequence
  Description of Artificial Sequence: Synthetic peptide
  Seed: HIHIFSFTGEEMATK
HIHLFSHTWEELATK

SEQ ID NO: 280532 - protein, 15 aa, Artificial Sequence
  Description of Artificial Sequence: Synthetic peptide
  Seed: HIHIFSFTGEEMATK
HIHLFSHTWEEVATK

SEQ ID NO: 280533 - protein, 15 aa, Artificial Sequence
  Description of Artificial Sequence: Synthetic peptide
  Seed: HIHIFSFTGEEMATK
HIHLFSHTYEEFATK

SEQ ID NO: 280534 - protein, 15 aa, Artificial Sequence
  Description of Artificial Sequence: Synthetic peptide
  Seed: HIHIFSFTGEEMATK
HIHLFSHTYEEIATK

SEQ ID NO: 280535 - protein, 15 aa, Artificial Sequence
  Description of Artificial Sequence: Synthetic peptide
  Seed: HIHIFSFTGEEMATK
HIHLFSHTYEELATK

SEQ ID NO: 280536 - protein, 15 aa, Artificial Sequence
  Description of Artificial Sequence: Synthetic peptide
  Seed: HIHIFSFTGEEMATK
HIHLFSHTYEEMATK

SEQ ID NO: 280537 - protein, 15 aa, Artificial Sequence
  Description of Artificial Sequence: Synthetic peptide
  Seed: HIHIFSFTGEEMATK
HIHLFSHTYEEVATK

SEQ ID NO: 280538 - protein, 15 aa, Artificial Sequence
  Description of Artificial Sequence: Synthetic peptide
  Seed: HIHIFSFTGEEMATK
HIHLFSITAEEAATK

SEQ ID NO: 280539 - protein, 15 aa, Artificial Sequence
  Description of Artificial Sequence: Synthetic peptide
  Seed: HIHIFSFTGEEMATK
HIHLFSITAEEIATK

SEQ ID NO: 280540 - protein, 15 aa, Artificial Sequence
  Description of Artificial Sequence: Synthetic peptide
  Seed: HIHIFSFTGEEMATK
HIHLFSITAEELATK

SEQ ID NO: 280541 - protein, 15 aa, Artificial Sequence
  Description of Artificial Sequence: Synthetic peptide
  Seed: HIHIFSFTGEEMATK
HIHLFSITAEENATK

SEQ ID NO: 280542 - protein, 15 aa, Artificial Sequence
  Description of Artificial Sequence: Synthetic peptide
  Seed: HIHIFSFTGEEMATK
HIHLFSITAEESATK

SEQ ID NO: 280543 - protein, 15 aa, Artificial Sequence
  Description of Artificial Sequence: Synthetic peptide
  Seed: HIHIFSFTGEEMATK
HIHLFSITAEEVATK

SEQ ID NO: 280544 - protein, 15 aa, Artificial Sequence
  Description of Artificial Sequence: Synthetic peptide
  Seed: HIHIFSFTGEEMATK
HIHLFSITFEEAATK

SEQ ID NO: 280545 - protein, 15 aa, Artificial Sequence
  Description of Artificial Sequence: Synthetic peptide
  Seed: HIHIFSFTGEEMATK
HIHLFSITFEECATK

SEQ ID NO: 280546 - protein, 15 aa, Artificial Sequence
  Description of Artificial Sequence: Synthetic peptide
  Seed: HIHIFSFTGEEMATK
HIHLFSITFEEDATK

SEQ ID NO: 280547 - protein, 15 aa, Artificial Sequence
  Description of Artificial Sequence: Synthetic peptide
  Seed: HIHIFSFTGEEMATK
HIHLFSITFEEEATK

SEQ ID NO: 280548 - protein, 15 aa, Artificial Sequence
  Description of Artificial Sequence: Synthetic peptide
  Seed: HIHIFSFTGEEMATK
HIHLFSITFEEFATK

SEQ ID NO: 280549 - protein, 15 aa, Artificial Sequence
  Description of Artificial Sequence: Synthetic peptide
  Seed: HIHIFSFTGEEMATK
HIHLFSITFEEGATK

SEQ ID NO: 280550 - protein, 15 aa, Artificial Sequence
  Description of Artificial Sequence: Synthetic peptide
  Seed: HIHIFSFTGEEMATK
HIHLFSITFEEHATK

SEQ ID NO: 280551 - protein, 15 aa, Artificial Sequence
  Description of Artificial Sequence: Synthetic peptide
  Seed: HIHIFSFTGEEMATK
HIHLFSITFEEIATK

SEQ ID NO: 280552 - protein, 15 aa, Artificial Sequence
  Description of Artificial Sequence: Synthetic peptide
  Seed: HIHIFSFTGEEMATK
HIHLFSITFEEKATK

SEQ ID NO: 280553 - protein, 15 aa, Artificial Sequence
  Description of Artificial Sequence: Synthetic peptide
  Seed: HIHIFSFTGEEMATK
HIHLFSITFEELATK

SEQ ID NO: 280554 - protein, 15 aa, Artificial Sequence
  Description of Artificial Sequence: Synthetic peptide
  Seed: HIHIFSFTGEEMATK
HIHLFSITFEEMATK

SEQ ID NO: 280555 - protein, 15 aa, Artificial Sequence
  Description of Artificial Sequence: Synthetic peptide
  Seed: HIHIFSFTGEEMATK
HIHLFSITFEENATK

SEQ ID NO: 280556 - protein, 15 aa, Artificial Sequence
  Description of Artificial Sequence: Synthetic peptide
  Seed: HIHIFSFTGEEMATK
HIHLFSITFEEPATK

SEQ ID NO: 280557 - protein, 15 aa, Artificial Sequence
  Description of Artificial Sequence: Synthetic peptide
  Seed: HIHIFSFTGEEMATK
HIHLFSITFEEQATK

SEQ ID NO: 280558 - protein, 15 aa, Artificial Sequence
  Description of Artificial Sequence: Synthetic peptide
  Seed: HIHIFSFTGEEMATK
HIHLFSITFEERATK

SEQ ID NO: 280559 - protein, 15 aa, Artificial Sequence
  Description of Artificial Sequence: Synthetic peptide
  Seed: HIHIFSFTGEEMATK
HIHLFSITFEESATK

SEQ ID NO: 280560 - protein, 15 aa, Artificial Sequence
  Description of Artificial Sequence: Synthetic peptide
  Seed: HIHIFSFTGEEMATK
HIHLFSITFEETATK

SEQ ID NO: 280561 - protein, 15 aa, Artificial Sequence
  Description of Artificial Sequence: Synthetic peptide
  Seed: HIHIFSFTGEEMATK
HIHLFSITFEEVATK

SEQ ID NO: 280562 - protein, 15 aa, Artificial Sequence
  Description of Artificial Sequence: Synthetic peptide
  Seed: HIHIFSFTGEEMATK
HIHLFSITFEEWATK

SEQ ID NO: 280563 - protein, 15 aa, Artificial Sequence
  Description of Artificial Sequence: Synthetic peptide
  Seed: HIHIFSFTGEEMATK
HIHLFSITFEEYATK

SEQ ID NO: 280564 - protein, 15 aa, Artificial Sequence
  Description of Artificial Sequence: Synthetic peptide
  Seed: HIHIFSFTGEEMATK
HIHLFSITGEEAATK

SEQ ID NO: 280565 - protein, 15 aa, Artificial Sequence
  Description of Artificial Sequence: Synthetic peptide
  Seed: HIHIFSFTGEEMATK
HIHLFSITGEEIATK

SEQ ID NO: 280566 - protein, 15 aa, Artificial Sequence
  Description of Artificial Sequence: Synthetic peptide
  Seed: HIHIFSFTGEEMATK
HIHLFSITGEELATK

SEQ ID NO: 280567 - protein, 15 aa, Artificial Sequence
  Description of Artificial Sequence: Synthetic peptide
  Seed: HIHIFSFTGEEMATK
HIHLFSITGEEVATK

SEQ ID NO: 280568 - protein, 15 aa, Artificial Sequence
  Description of Artificial Sequence: Synthetic peptide
  Seed: HIHIFSFTGEEMATK
HIHLFSITIEEFATK

SEQ ID NO: 280569 - protein, 15 aa, Artificial Sequence
  Description of Artificial Sequence: Synthetic peptide
  Seed: HIHIFSFTGEEMATK
HIHLFSITIEEIATK

SEQ ID NO: 280570 - protein, 15 aa, Artificial Sequence
  Description of Artificial Sequence: Synthetic peptide
  Seed: HIHIFSFTGEEMATK
HIHLFSITIEELATK

SEQ ID NO: 280571 - protein, 15 aa, Artificial Sequence
  Description of Artificial Sequence: Synthetic peptide
  Seed: HIHIFSFTGEEMATK
HIHLFSITIEEMATK

SEQ ID NO: 280572 - protein, 15 aa, Artificial Sequence
  Description of Artificial Sequence: Synthetic peptide
  Seed: HIHIFSFTGEEMATK
HIHLFSITIEEVATK

SEQ ID NO: 280573 - protein, 15 aa, Artificial Sequence
  Description of Artificial Sequence: Synthetic peptide
  Seed: HIHIFSFTGEEMATK
HIHLFSITLEEFATK

SEQ ID NO: 280574 - protein, 15 aa, Artificial Sequence
  Description of Artificial Sequence: Synthetic peptide
  Seed: HIHIFSFTGEEMATK
HIHLFSITLEEIATK

SEQ ID NO: 280575 - protein, 15 aa, Artificial Sequence
  Description of Artificial Sequence: Synthetic peptide
  Seed: HIHIFSFTGEEMATK
HIHLFSITLEELATK

SEQ ID NO: 280576 - protein, 15 aa, Artificial Sequence
  Description of Artificial Sequence: Synthetic peptide
  Seed: HIHIFSFTGEEMATK
HIHLFSITLEEMATK

SEQ ID NO: 280577 - protein, 15 aa, Artificial Sequence
  Description of Artificial Sequence: Synthetic peptide
  Seed: HIHIFSFTGEEMATK
HIHLFSITLEETATK

SEQ ID NO: 280578 - protein, 15 aa, Artificial Sequence
  Description of Artificial Sequence: Synthetic peptide
  Seed: HIHIFSFTGEEMATK
HIHLFSITLEEVATK

SEQ ID NO: 280579 - protein, 15 aa, Artificial Sequence
  Description of Artificial Sequence: Synthetic peptide
  Seed: HIHIFSFTGEEMATK
HIHLFSITLEEYATK

SEQ ID NO: 280580 - protein, 15 aa, Artificial Sequence
  Description of Artificial Sequence: Synthetic peptide
  Seed: HIHIFSFTGEEMATK
HIHLFSITMEEFATK

SEQ ID NO: 280581 - protein, 15 aa, Artificial Sequence
  Description of Artificial Sequence: Synthetic peptide
  Seed: HIHIFSFTGEEMATK
HIHLFSITMEEIATK

SEQ ID NO: 280582 - protein, 15 aa, Artificial Sequence
  Description of Artificial Sequence: Synthetic peptide
  Seed: HIHIFSFTGEEMATK
HIHLFSITMEELATK

SEQ ID NO: 280583 - protein, 15 aa, Artificial Sequence
  Description of Artificial Sequence: Synthetic peptide
  Seed: HIHIFSFTGEEMATK
HIHLFSITMEEMATK

SEQ ID NO: 280584 - protein, 15 aa, Artificial Sequence
  Description of Artificial Sequence: Synthetic peptide
  Seed: HIHIFSFTGEEMATK
HIHLFSITMEEVATK

SEQ ID NO: 280585 - protein, 15 aa, Artificial Sequence
  Description of Artificial Sequence: Synthetic peptide
  Seed: HIHIFSFTGEEMATK
HIHLFSITPEEAATK

SEQ ID NO: 280586 - protein, 15 aa, Artificial Sequence
  Description of Artificial Sequence: Synthetic peptide
  Seed: HIHIFSFTGEEMATK
HIHLFSITSEEAATK

SEQ ID NO: 280587 - protein, 15 aa, Artificial Sequence
  Description of Artificial Sequence: Synthetic peptide
  Seed: HIHIFSFTGEEMATK
HIHLFSITSEEIATK

SEQ ID NO: 280588 - protein, 15 aa, Artificial Sequence
  Description of Artificial Sequence: Synthetic peptide
  Seed: HIHIFSFTGEEMATK
HIHLFSITSEELATK

SEQ ID NO: 280589 - protein, 15 aa, Artificial Sequence
  Description of Artificial Sequence: Synthetic peptide
  Seed: HIHIFSFTGEEMATK
HIHLFSITSEESATK

SEQ ID NO: 280590 - protein, 15 aa, Artificial Sequence
  Description of Artificial Sequence: Synthetic peptide
  Seed: HIHIFSFTGEEMATK
HIHLFSITSEEVATK

SEQ ID NO: 280591 - protein, 15 aa, Artificial Sequence
  Description of Artificial Sequence: Synthetic peptide
  Seed: HIHIFSFTGEEMATK
HIHLFSITVEEAATK

SEQ ID NO: 280592 - protein, 15 aa, Artificial Sequence
  Description of Artificial Sequence: Synthetic peptide
  Seed: HIHIFSFTGEEMATK
HIHLFSITVEEIATK

SEQ ID NO: 280593 - protein, 15 aa, Artificial Sequence
  Description of Artificial Sequence: Synthetic peptide
  Seed: HIHIFSFTGEEMATK
HIHLFSITVEELATK

SEQ ID NO: 280594 - protein, 15 aa, Artificial Sequence
  Description of Artificial Sequence: Synthetic peptide
  Seed: HIHIFSFTGEEMATK
HIHLFSITWEEAATK

SEQ ID NO: 280595 - protein, 15 aa, Artificial Sequence
  Description of Artificial Sequence: Synthetic peptide
  Seed: HIHIFSFTGEEMATK
HIHLFSITWEEFATK

SEQ ID NO: 280596 - protein, 15 aa, Artificial Sequence
  Description of Artificial Sequence: Synthetic peptide
  Seed: HIHIFSFTGEEMATK
HIHLFSITWEEIATK

SEQ ID NO: 280597 - protein, 15 aa, Artificial Sequence
  Description of Artificial Sequence: Synthetic peptide
  Seed: HIHIFSFTGEEMATK
HIHLFSITWEELATK

SEQ ID NO: 280598 - protein, 15 aa, Artificial Sequence
  Description of Artificial Sequence: Synthetic peptide
  Seed: HIHIFSFTGEEMATK
HIHLFSITWEEMATK

SEQ ID NO: 280599 - protein, 15 aa, Artificial Sequence
  Description of Artificial Sequence: Synthetic peptide
  Seed: HIHIFSFTGEEMATK
HIHLFSITWEETATK

SEQ ID NO: 280600 - protein, 15 aa, Artificial Sequence
  Description of Artificial Sequence: Synthetic peptide
  Seed: HIHIFSFTGEEMATK
HIHLFSITWEEVATK

SEQ ID NO: 280601 - protein, 15 aa, Artificial Sequence
  Description of Artificial Sequence: Synthetic peptide
  Seed: HIHIFSFTGEEMATK
HIHLFSITWEEYATK

SEQ ID NO: 280602 - protein, 15 aa, Artificial Sequence
  Description of Artificial Sequence: Synthetic peptide
  Seed: HIHIFSFTGEEMATK
HIHLFSITYEEAATK

SEQ ID NO: 280603 - protein, 15 aa, Artificial Sequence
  Description of Artificial Sequence: Synthetic peptide
  Seed: HIHIFSFTGEEMATK
HIHLFSITYEEFATK

SEQ ID NO: 280604 - protein, 15 aa, Artificial Sequence
  Description of Artificial Sequence: Synthetic peptide
  Seed: HIHIFSFTGEEMATK
HIHLFSITYEEIATK

SEQ ID NO: 280605 - protein, 15 aa, Artificial Sequence
  Description of Artificial Sequence: Synthetic peptide
  Seed: HIHIFSFTGEEMATK
HIHLFSITYEELATK

SEQ ID NO: 280606 - protein, 15 aa, Artificial Sequence
  Description of Artificial Sequence: Synthetic peptide
  Seed: HIHIFSFTGEEMATK
HIHLFSITYEEMATK

SEQ ID NO: 280607 - protein, 15 aa, Artificial Sequence
  Description of Artificial Sequence: Synthetic peptide
  Seed: HIHIFSFTGEEMATK
HIHLFSITYEESATK

SEQ ID NO: 280608 - protein, 15 aa, Artificial Sequence
  Description of Artificial Sequence: Synthetic peptide
  Seed: HIHIFSFTGEEMATK
HIHLFSITYEETATK

SEQ ID NO: 280609 - protein, 15 aa, Artificial Sequence
  Description of Artificial Sequence: Synthetic peptide
  Seed: HIHIFSFTGEEMATK
HIHLFSITYEEVATK

SEQ ID NO: 280610 - protein, 15 aa, Artificial Sequence
  Description of Artificial Sequence: Synthetic peptide
  Seed: HIHIFSFTGEEMATK
HIHLFSITYEEYATK

SEQ ID NO: 280611 - protein, 15 aa, Artificial Sequence
  Description of Artificial Sequence: Synthetic peptide
  Seed: HIHIFSFTGEEMATK
HIHLFSKTFEEAATK

SEQ ID NO: 280612 - protein, 15 aa, Artificial Sequence
  Description of Artificial Sequence: Synthetic peptide
  Seed: HIHIFSFTGEEMATK
HIHLFSKTFEEFATK

SEQ ID NO: 280613 - protein, 15 aa, Artificial Sequence
  Description of Artificial Sequence: Synthetic peptide
  Seed: HIHIFSFTGEEMATK
HIHLFSKTFEEIATK

SEQ ID NO: 280614 - protein, 15 aa, Artificial Sequence
  Description of Artificial Sequence: Synthetic peptide
  Seed: HIHIFSFTGEEMATK
HIHLFSKTFEELATK

SEQ ID NO: 280615 - protein, 15 aa, Artificial Sequence
  Description of Artificial Sequence: Synthetic peptide
  Seed: HIHIFSFTGEEMATK
HIHLFSKTFEEMATK

SEQ ID NO: 280616 - protein, 15 aa, Artificial Sequence
  Description of Artificial Sequence: Synthetic peptide
  Seed: HIHIFSFTGEEMATK
HIHLFSKTFEESATK

SEQ ID NO: 280617 - protein, 15 aa, Artificial Sequence
  Description of Artificial Sequence: Synthetic peptide
  Seed: HIHIFSFTGEEMATK
HIHLFSKTFEETATK

SEQ ID NO: 280618 - protein, 15 aa, Artificial Sequence
  Description of Artificial Sequence: Synthetic peptide
  Seed: HIHIFSFTGEEMATK
HIHLFSKTFEEVATK

SEQ ID NO: 280619 - protein, 15 aa, Artificial Sequence
  Description of Artificial Sequence: Synthetic peptide
  Seed: HIHIFSFTGEEMATK
HIHLFSKTLEEIATK

SEQ ID NO: 280620 - protein, 15 aa, Artificial Sequence
  Description of Artificial Sequence: Synthetic peptide
  Seed: HIHIFSFTGEEMATK
HIHLFSKTLEELATK

SEQ ID NO: 280621 - protein, 15 aa, Artificial Sequence
  Description of Artificial Sequence: Synthetic peptide
  Seed: HIHIFSFTGEEMATK
HIHLFSKTWEEIATK

SEQ ID NO: 280622 - protein, 15 aa, Artificial Sequence
  Description of Artificial Sequence: Synthetic peptide
  Seed: HIHIFSFTGEEMATK
HIHLFSKTWEELATK

SEQ ID NO: 280623 - protein, 15 aa, Artificial Sequence
  Description of Artificial Sequence: Synthetic peptide
  Seed: HIHIFSFTGEEMATK
HIHLFSKTYEEIATK

SEQ ID NO: 280624 - protein, 15 aa, Artificial Sequence
  Description of Artificial Sequence: Synthetic peptide
  Seed: HIHIFSFTGEEMATK
HIHLFSKTYEELATK

SEQ ID NO: 280625 - protein, 15 aa, Artificial Sequence
  Description of Artificial Sequence: Synthetic peptide
  Seed: HIHIFSFTGEEMATK
HIHLFSKTYEEVATK

SEQ ID NO: 280626 - protein, 15 aa, Artificial Sequence
  Description of Artificial Sequence: Synthetic peptide
  Seed: HIHIFSFTGEEMATK
HIHLFSLTAEEAATK

SEQ ID NO: 280627 - protein, 15 aa, Artificial Sequence
  Description of Artificial Sequence: Synthetic peptide
  Seed: HIHIFSFTGEEMATK
HIHLFSLTAEEGATK

SEQ ID NO: 280628 - protein, 15 aa, Artificial Sequence
  Description of Artificial Sequence: Synthetic peptide
  Seed: HIHIFSFTGEEMATK
HIHLFSLTAEEHATK

SEQ ID NO: 280629 - protein, 15 aa, Artificial Sequence
  Description of Artificial Sequence: Synthetic peptide
  Seed: HIHIFSFTGEEMATK
HIHLFSLTAEEIATK

SEQ ID NO: 280630 - protein, 15 aa, Artificial Sequence
  Description of Artificial Sequence: Synthetic peptide
  Seed: HIHIFSFTGEEMATK
HIHLFSLTAEELATK

SEQ ID NO: 280631 - protein, 15 aa, Artificial Sequence
  Description of Artificial Sequence: Synthetic peptide
  Seed: HIHIFSFTGEEMATK
HIHLFSLTAEEMATK

SEQ ID NO: 280632 - protein, 15 aa, Artificial Sequence
  Description of Artificial Sequence: Synthetic peptide
  Seed: HIHIFSFTGEEMATK
HIHLFSLTAEENATK

SEQ ID NO: 280633 - protein, 15 aa, Artificial Sequence
  Description of Artificial Sequence: Synthetic peptide
  Seed: HIHIFSFTGEEMATK
HIHLFSLTAEESATK

SEQ ID NO: 280634 - protein, 15 aa, Artificial Sequence
  Description of Artificial Sequence: Synthetic peptide
  Seed: HIHIFSFTGEEMATK
HIHLFSLTAEETATK

SEQ ID NO: 280635 - protein, 15 aa, Artificial Sequence
  Description of Artificial Sequence: Synthetic peptide
  Seed: HIHIFSFTGEEMATK
HIHLFSLTAEEVATK

SEQ ID NO: 280636 - protein, 15 aa, Artificial Sequence
  Description of Artificial Sequence: Synthetic peptide
  Seed: HIHIFSFTGEEMATK
HIHLFSLTFEEAATK

SEQ ID NO: 280637 - protein, 15 aa, Artificial Sequence
  Description of Artificial Sequence: Synthetic peptide
  Seed: HIHIFSFTGEEMATK
HIHLFSLTFEECATK

SEQ ID NO: 280638 - protein, 15 aa, Artificial Sequence
  Description of Artificial Sequence: Synthetic peptide
  Seed: HIHIFSFTGEEMATK
HIHLFSLTFEEDATK

SEQ ID NO: 280639 - protein, 15 aa, Artificial Sequence
  Description of Artificial Sequence: Synthetic peptide
  Seed: HIHIFSFTGEEMATK
HIHLFSLTFEEEATK

SEQ ID NO: 280640 - protein, 15 aa, Artificial Sequence
  Description of Artificial Sequence: Synthetic peptide
  Seed: HIHIFSFTGEEMATK
HIHLFSLTFEEFATK

SEQ ID NO: 280641 - protein, 15 aa, Artificial Sequence
  Description of Artificial Sequence: Synthetic peptide
  Seed: HIHIFSFTGEEMATK
HIHLFSLTFEEHATK

SEQ ID NO: 280642 - protein, 15 aa, Artificial Sequence
  Description of Artificial Sequence: Synthetic peptide
  Seed: HIHIFSFTGEEMATK
HIHLFSLTFEEIATK

SEQ ID NO: 280643 - protein, 15 aa, Artificial Sequence
  Description of Artificial Sequence: Synthetic peptide
  Seed: HIHIFSFTGEEMATK
HIHLFSLTFEEKATK

SEQ ID NO: 280644 - protein, 15 aa, Artificial Sequence
  Description of Artificial Sequence: Synthetic peptide
  Seed: HIHIFSFTGEEMATK
HIHLFSLTFEELATK

SEQ ID NO: 280645 - protein, 15 aa, Artificial Sequence
  Description of Artificial Sequence: Synthetic peptide
  Seed: HIHIFSFTGEEMATK
HIHLFSLTFEEMATK

SEQ ID NO: 280646 - protein, 15 aa, Artificial Sequence
  Description of Artificial Sequence: Synthetic peptide
  Seed: HIHIFSFTGEEMATK
HIHLFSLTFEENATK

SEQ ID NO: 280647 - protein, 15 aa, Artificial Sequence
  Description of Artificial Sequence: Synthetic peptide
  Seed: HIHIFSFTGEEMATK
HIHLFSLTFEEPATK

SEQ ID NO: 280648 - protein, 15 aa, Artificial Sequence
  Description of Artificial Sequence: Synthetic peptide
  Seed: HIHIFSFTGEEMATK
HIHLFSLTFEEQATK

SEQ ID NO: 280649 - protein, 15 aa, Artificial Sequence
  Description of Artificial Sequence: Synthetic peptide
  Seed: HIHIFSFTGEEMATK
HIHLFSLTFEERATK

SEQ ID NO: 280650 - protein, 15 aa, Artificial Sequence
  Description of Artificial Sequence: Synthetic peptide
  Seed: HIHIFSFTGEEMATK
HIHLFSLTFEESATK

SEQ ID NO: 280651 - protein, 15 aa, Artificial Sequence
  Description of Artificial Sequence: Synthetic peptide
  Seed: HIHIFSFTGEEMATK
HIHLFSLTFEETATK

SEQ ID NO: 280652 - protein, 15 aa, Artificial Sequence
  Description of Artificial Sequence: Synthetic peptide
  Seed: HIHIFSFTGEEMATK
HIHLFSLTFEEVATK

SEQ ID NO: 280653 - protein, 15 aa, Artificial Sequence
  Description of Artificial Sequence: Synthetic peptide
  Seed: HIHIFSFTGEEMATK
HIHLFSLTFEEWATK

SEQ ID NO: 280654 - protein, 15 aa, Artificial Sequence
  Description of Artificial Sequence: Synthetic peptide
  Seed: HIHIFSFTGEEMATK
HIHLFSLTFEEYATK

SEQ ID NO: 280655 - protein, 15 aa, Artificial Sequence
  Description of Artificial Sequence: Synthetic peptide
  Seed: HIHIFSFTGEEMATK
HIHLFSLTGEEAATK

SEQ ID NO: 280656 - protein, 15 aa, Artificial Sequence
  Description of Artificial Sequence: Synthetic peptide
  Seed: HIHIFSFTGEEMATK
HIHLFSLTGEEGATK

SEQ ID NO: 280657 - protein, 15 aa, Artificial Sequence
  Description of Artificial Sequence: Synthetic peptide
  Seed: HIHIFSFTGEEMATK
HIHLFSLTGEEIATK

SEQ ID NO: 280658 - protein, 15 aa, Artificial Sequence
  Description of Artificial Sequence: Synthetic peptide
  Seed: HIHIFSFTGEEMATK
HIHLFSLTGEELATK

SEQ ID NO: 280659 - protein, 15 aa, Artificial Sequence
  Description of Artificial Sequence: Synthetic peptide
  Seed: HIHIFSFTGEEMATK
HIHLFSLTGEEMATK

SEQ ID NO: 280660 - protein, 15 aa, Artificial Sequence
  Description of Artificial Sequence: Synthetic peptide
  Seed: HIHIFSFTGEEMATK
HIHLFSLTGEESATK

SEQ ID NO: 280661 - protein, 15 aa, Artificial Sequence
  Description of Artificial Sequence: Synthetic peptide
  Seed: HIHIFSFTGEEMATK
HIHLFSLTGEETATK

SEQ ID NO: 280662 - protein, 15 aa, Artificial Sequence
  Description of Artificial Sequence: Synthetic peptide
  Seed: HIHIFSFTGEEMATK
HIHLFSLTGEEVATK

SEQ ID NO: 280663 - protein, 15 aa, Artificial Sequence
  Description of Artificial Sequence: Synthetic peptide
  Seed: HIHIFSFTGEEMATK
HIHLFSLTIEEAATK

SEQ ID NO: 280664 - protein, 15 aa, Artificial Sequence
  Description of Artificial Sequence: Synthetic peptide
  Seed: HIHIFSFTGEEMATK
HIHLFSLTIEEFATK

SEQ ID NO: 280665 - protein, 15 aa, Artificial Sequence
  Description of Artificial Sequence: Synthetic peptide
  Seed: HIHIFSFTGEEMATK
HIHLFSLTIEEIATK

SEQ ID NO: 280666 - protein, 15 aa, Artificial Sequence
  Description of Artificial Sequence: Synthetic peptide
  Seed: HIHIFSFTGEEMATK
HIHLFSLTIEELATK

SEQ ID NO: 280667 - protein, 15 aa, Artificial Sequence
  Description of Artificial Sequence: Synthetic peptide
  Seed: HIHIFSFTGEEMATK
HIHLFSLTIEENATK

SEQ ID NO: 280668 - protein, 15 aa, Artificial Sequence
  Description of Artificial Sequence: Synthetic peptide
  Seed: HIHIFSFTGEEMATK
HIHLFSLTIEESATK

SEQ ID NO: 280669 - protein, 15 aa, Artificial Sequence
  Description of Artificial Sequence: Synthetic peptide
  Seed: HIHIFSFTGEEMATK
HIHLFSLTIEETATK

SEQ ID NO: 280670 - protein, 15 aa, Artificial Sequence
  Description of Artificial Sequence: Synthetic peptide
  Seed: HIHIFSFTGEEMATK
HIHLFSLTIEEVATK

SEQ ID NO: 280671 - protein, 15 aa, Artificial Sequence
  Description of Artificial Sequence: Synthetic peptide
  Seed: HIHIFSFTGEEMATK
HIHLFSLTLEEFATK

SEQ ID NO: 280672 - protein, 15 aa, Artificial Sequence
  Description of Artificial Sequence: Synthetic peptide
  Seed: HIHIFSFTGEEMATK
HIHLFSLTLEEIATK

SEQ ID NO: 280673 - protein, 15 aa, Artificial Sequence
  Description of Artificial Sequence: Synthetic peptide
  Seed: HIHIFSFTGEEMATK
HIHLFSLTLEELATK

SEQ ID NO: 280674 - protein, 15 aa, Artificial Sequence
  Description of Artificial Sequence: Synthetic peptide
  Seed: HIHIFSFTGEEMATK
HIHLFSLTLEEMATK

SEQ ID NO: 280675 - protein, 15 aa, Artificial Sequence
  Description of Artificial Sequence: Synthetic peptide
  Seed: HIHIFSFTGEEMATK
HIHLFSLTLEEVATK

SEQ ID NO: 280676 - protein, 15 aa, Artificial Sequence
  Description of Artificial Sequence: Synthetic peptide
  Seed: HIHIFSFTGEEMATK
HIHLFSLTLEEYATK

SEQ ID NO: 280677 - protein, 15 aa, Artificial Sequence
  Description of Artificial Sequence: Synthetic peptide
  Seed: HIHIFSFTGEEMATK
HIHLFSLTMEEFATK

SEQ ID NO: 280678 - protein, 15 aa, Artificial Sequence
  Description of Artificial Sequence: Synthetic peptide
  Seed: HIHIFSFTGEEMATK
HIHLFSLTMEEIATK

SEQ ID NO: 280679 - protein, 15 aa, Artificial Sequence
  Description of Artificial Sequence: Synthetic peptide
  Seed: HIHIFSFTGEEMATK
HIHLFSLTMEELATK

SEQ ID NO: 280680 - protein, 15 aa, Artificial Sequence
  Description of Artificial Sequence: Synthetic peptide
  Seed: HIHIFSFTGEEMATK
HIHLFSLTMEEMATK

SEQ ID NO: 280681 - protein, 15 aa, Artificial Sequence
  Description of Artificial Sequence: Synthetic peptide
  Seed: HIHIFSFTGEEMATK
HIHLFSLTMEEVATK

SEQ ID NO: 280682 - protein, 15 aa, Artificial Sequence
  Description of Artificial Sequence: Synthetic peptide
  Seed: HIHIFSFTGEEMATK
HIHLFSLTNEEAATK

SEQ ID NO: 280683 - protein, 15 aa, Artificial Sequence
  Description of Artificial Sequence: Synthetic peptide
  Seed: HIHIFSFTGEEMATK
HIHLFSLTNEEIATK

SEQ ID NO: 280684 - protein, 15 aa, Artificial Sequence
  Description of Artificial Sequence: Synthetic peptide
  Seed: HIHIFSFTGEEMATK
HIHLFSLTNEELATK

SEQ ID NO: 280685 - protein, 15 aa, Artificial Sequence
  Description of Artificial Sequence: Synthetic peptide
  Seed: HIHIFSFTGEEMATK
HIHLFSLTNEEVATK

SEQ ID NO: 280686 - protein, 15 aa, Artificial Sequence
  Description of Artificial Sequence: Synthetic peptide
  Seed: HIHIFSFTGEEMATK
HIHLFSLTPEEAATK

SEQ ID NO: 280687 - protein, 15 aa, Artificial Sequence
  Description of Artificial Sequence: Synthetic peptide
  Seed: HIHIFSFTGEEMATK
HIHLFSLTPEEIATK

SEQ ID NO: 280688 - protein, 15 aa, Artificial Sequence
  Description of Artificial Sequence: Synthetic peptide
  Seed: HIHIFSFTGEEMATK
HIHLFSLTPEELATK

SEQ ID NO: 280689 - protein, 15 aa, Artificial Sequence
  Description of Artificial Sequence: Synthetic peptide
  Seed: HIHIFSFTGEEMATK
HIHLFSLTPEEMATK

SEQ ID NO: 280690 - protein, 15 aa, Artificial Sequence
  Description of Artificial Sequence: Synthetic peptide
  Seed: HIHIFSFTGEEMATK
HIHLFSLTPEENATK

SEQ ID NO: 280691 - protein, 15 aa, Artificial Sequence
  Description of Artificial Sequence: Synthetic peptide
  Seed: HIHIFSFTGEEMATK
HIHLFSLTPEESATK

SEQ ID NO: 280692 - protein, 15 aa, Artificial Sequence
  Description of Artificial Sequence: Synthetic peptide
  Seed: HIHIFSFTGEEMATK
HIHLFSLTPEETATK

SEQ ID NO: 280693 - protein, 15 aa, Artificial Sequence
  Description of Artificial Sequence: Synthetic peptide
  Seed: HIHIFSFTGEEMATK
HIHLFSLTPEEVATK

SEQ ID NO: 280694 - protein, 15 aa, Artificial Sequence
  Description of Artificial Sequence: Synthetic peptide
  Seed: HIHIFSFTGEEMATK
HIHLFSLTSEEAATK

SEQ ID NO: 280695 - protein, 15 aa, Artificial Sequence
  Description of Artificial Sequence: Synthetic peptide
  Seed: HIHIFSFTGEEMATK
HIHLFSLTSEEIATK

SEQ ID NO: 280696 - protein, 15 aa, Artificial Sequence
  Description of Artificial Sequence: Synthetic peptide
  Seed: HIHIFSFTGEEMATK
HIHLFSLTSEELATK

SEQ ID NO: 280697 - protein, 15 aa, Artificial Sequence
  Description of Artificial Sequence: Synthetic peptide
  Seed: HIHIFSFTGEEMATK
HIHLFSLTSEEMATK

SEQ ID NO: 280698 - protein, 15 aa, Artificial Sequence
  Description of Artificial Sequence: Synthetic peptide
  Seed: HIHIFSFTGEEMATK
HIHLFSLTSEENATK

SEQ ID NO: 280699 - protein, 15 aa, Artificial Sequence
  Description of Artificial Sequence: Synthetic peptide
  Seed: HIHIFSFTGEEMATK
HIHLFSLTSEESATK

SEQ ID NO: 280700 - protein, 15 aa, Artificial Sequence
  Description of Artificial Sequence: Synthetic peptide
  Seed: HIHIFSFTGEEMATK
HIHLFSLTSEETATK

SEQ ID NO: 280701 - protein, 15 aa, Artificial Sequence
  Description of Artificial Sequence: Synthetic peptide
  Seed: HIHIFSFTGEEMATK
HIHLFSLTSEEVATK

SEQ ID NO: 280702 - protein, 15 aa, Artificial Sequence
  Description of Artificial Sequence: Synthetic peptide
  Seed: HIHIFSFTGEEMATK
HIHLFSLTTEEAATK

SEQ ID NO: 280703 - protein, 15 aa, Artificial Sequence
  Description of Artificial Sequence: Synthetic peptide
  Seed: HIHIFSFTGEEMATK
HIHLFSLTTEEIATK

SEQ ID NO: 280704 - protein, 15 aa, Artificial Sequence
  Description of Artificial Sequence: Synthetic peptide
  Seed: HIHIFSFTGEEMATK
HIHLFSLTTEELATK

SEQ ID NO: 280705 - protein, 15 aa, Artificial Sequence
  Description of Artificial Sequence: Synthetic peptide
  Seed: HIHIFSFTGEEMATK
HIHLFSLTTEEMATK

SEQ ID NO: 280706 - protein, 15 aa, Artificial Sequence
  Description of Artificial Sequence: Synthetic peptide
  Seed: HIHIFSFTGEEMATK
HIHLFSLTTEENATK

SEQ ID NO: 280707 - protein, 15 aa, Artificial Sequence
  Description of Artificial Sequence: Synthetic peptide
  Seed: HIHIFSFTGEEMATK
HIHLFSLTTEESATK

SEQ ID NO: 280708 - protein, 15 aa, Artificial Sequence
  Description of Artificial Sequence: Synthetic peptide
  Seed: HIHIFSFTGEEMATK
HIHLFSLTTEETATK

SEQ ID NO: 280709 - protein, 15 aa, Artificial Sequence
  Description of Artificial Sequence: Synthetic peptide
  Seed: HIHIFSFTGEEMATK
HIHLFSLTTEEVATK

SEQ ID NO: 280710 - protein, 15 aa, Artificial Sequence
  Description of Artificial Sequence: Synthetic peptide
  Seed: HIHIFSFTGEEMATK
HIHLFSLTVEEAATK

SEQ ID NO: 280711 - protein, 15 aa, Artificial Sequence
  Description of Artificial Sequence: Synthetic peptide
  Seed: HIHIFSFTGEEMATK
HIHLFSLTVEEHATK

SEQ ID NO: 280712 - protein, 15 aa, Artificial Sequence
  Description of Artificial Sequence: Synthetic peptide
  Seed: HIHIFSFTGEEMATK
HIHLFSLTVEEMATK

SEQ ID NO: 280713 - protein, 15 aa, Artificial Sequence
  Description of Artificial Sequence: Synthetic peptide
  Seed: HIHIFSFTGEEMATK
HIHLFSLTVEENATK

SEQ ID NO: 280714 - protein, 15 aa, Artificial Sequence
  Description of Artificial Sequence: Synthetic peptide
  Seed: HIHIFSFTGEEMATK
HIHLFSLTVEESATK

SEQ ID NO: 280715 - protein, 15 aa, Artificial Sequence
  Description of Artificial Sequence: Synthetic peptide
  Seed: HIHIFSFTGEEMATK
HIHLFSLTVEETATK

SEQ ID NO: 280716 - protein, 15 aa, Artificial Sequence
  Description of Artificial Sequence: Synthetic peptide
  Seed: HIHIFSFTGEEMATK
HIHLFSLTVEEVATK

SEQ ID NO: 280717 - protein, 15 aa, Artificial Sequence
  Description of Artificial Sequence: Synthetic peptide
  Seed: HIHIFSFTGEEMATK
HIHLFSLTWEEFATK

SEQ ID NO: 280718 - protein, 15 aa, Artificial Sequence
  Description of Artificial Sequence: Synthetic peptide
  Seed: HIHIFSFTGEEMATK
HIHLFSLTWEEIATK

SEQ ID NO: 280719 - protein, 15 aa, Artificial Sequence
  Description of Artificial Sequence: Synthetic peptide
  Seed: HIHIFSFTGEEMATK
HIHLFSLTWEELATK

SEQ ID NO: 280720 - protein, 15 aa, Artificial Sequence
  Description of Artificial Sequence: Synthetic peptide
  Seed: HIHIFSFTGEEMATK
HIHLFSLTWEEMATK

SEQ ID NO: 280721 - protein, 15 aa, Artificial Sequence
  Description of Artificial Sequence: Synthetic peptide
  Seed: HIHIFSFTGEEMATK
HIHLFSLTWEETATK

SEQ ID NO: 280722 - protein, 15 aa, Artificial Sequence
  Description of Artificial Sequence: Synthetic peptide
  Seed: HIHIFSFTGEEMATK
HIHLFSLTWEEVATK

SEQ ID NO: 280723 - protein, 15 aa, Artificial Sequence
  Description of Artificial Sequence: Synthetic peptide
  Seed: HIHIFSFTGEEMATK
HIHLFSLTWEEYATK

SEQ ID NO: 280724 - protein, 15 aa, Artificial Sequence
  Description of Artificial Sequence: Synthetic peptide
  Seed: HIHIFSFTGEEMATK
HIHLFSLTYEEAATK

SEQ ID NO: 280725 - protein, 15 aa, Artificial Sequence
  Description of Artificial Sequence: Synthetic peptide
  Seed: HIHIFSFTGEEMATK
HIHLFSLTYEEFATK

SEQ ID NO: 280726 - protein, 15 aa, Artificial Sequence
  Description of Artificial Sequence: Synthetic peptide
  Seed: HIHIFSFTGEEMATK
HIHLFSLTYEEIATK

SEQ ID NO: 280727 - protein, 15 aa, Artificial Sequence
  Description of Artificial Sequence: Synthetic peptide
  Seed: HIHIFSFTGEEMATK
HIHLFSLTYEELATK

SEQ ID NO: 280728 - protein, 15 aa, Artificial Sequence
  Description of Artificial Sequence: Synthetic peptide
  Seed: HIHIFSFTGEEMATK
HIHLFSLTYEEMATK

SEQ ID NO: 280729 - protein, 15 aa, Artificial Sequence
  Description of Artificial Sequence: Synthetic peptide
  Seed: HIHIFSFTGEEMATK
HIHLFSLTYEESATK

SEQ ID NO: 280730 - protein, 15 aa, Artificial Sequence
  Description of Artificial Sequence: Synthetic peptide
  Seed: HIHIFSFTGEEMATK
HIHLFSLTYEETATK

SEQ ID NO: 280731 - protein, 15 aa, Artificial Sequence
  Description of Artificial Sequence: Synthetic peptide
  Seed: HIHIFSFTGEEMATK
HIHLFSLTYEEVATK

SEQ ID NO: 280732 - protein, 15 aa, Artificial Sequence
  Description of Artificial Sequence: Synthetic peptide
  Seed: HIHIFSFTGEEMATK
HIHLFSLTYEEYATK

SEQ ID NO: 280733 - protein, 15 aa, Artificial Sequence
  Description of Artificial Sequence: Synthetic peptide
  Seed: HIHIFSFTGEEMATK
HIHLFSMTAEEAATK

SEQ ID NO: 280734 - protein, 15 aa, Artificial Sequence
  Description of Artificial Sequence: Synthetic peptide
  Seed: HIHIFSFTGEEMATK
HIHLFSMTAEEHATK

SEQ ID NO: 280735 - protein, 15 aa, Artificial Sequence
  Description of Artificial Sequence: Synthetic peptide
  Seed: HIHIFSFTGEEMATK
HIHLFSMTAEEIATK

SEQ ID NO: 280736 - protein, 15 aa, Artificial Sequence
  Description of Artificial Sequence: Synthetic peptide
  Seed: HIHIFSFTGEEMATK
HIHLFSMTAEELATK

SEQ ID NO: 280737 - protein, 15 aa, Artificial Sequence
  Description of Artificial Sequence: Synthetic peptide
  Seed: HIHIFSFTGEEMATK
HIHLFSMTAEEMATK

SEQ ID NO: 280738 - protein, 15 aa, Artificial Sequence
  Description of Artificial Sequence: Synthetic peptide
  Seed: HIHIFSFTGEEMATK
HIHLFSMTAEENATK

SEQ ID NO: 280739 - protein, 15 aa, Artificial Sequence
  Description of Artificial Sequence: Synthetic peptide
  Seed: HIHIFSFTGEEMATK
HIHLFSMTAEESATK

SEQ ID NO: 280740 - protein, 15 aa, Artificial Sequence
  Description of Artificial Sequence: Synthetic peptide
  Seed: HIHIFSFTGEEMATK
HIHLFSMTAEETATK

SEQ ID NO: 280741 - protein, 15 aa, Artificial Sequence
  Description of Artificial Sequence: Synthetic peptide
  Seed: HIHIFSFTGEEMATK
HIHLFSMTAEEVATK

SEQ ID NO: 280742 - protein, 15 aa, Artificial Sequence
  Description of Artificial Sequence: Synthetic peptide
  Seed: HIHIFSFTGEEMATK
HIHLFSMTFEEAATK

SEQ ID NO: 280743 - protein, 15 aa, Artificial Sequence
  Description of Artificial Sequence: Synthetic peptide
  Seed: HIHIFSFTGEEMATK
HIHLFSMTFEEDATK

SEQ ID NO: 280744 - protein, 15 aa, Artificial Sequence
  Description of Artificial Sequence: Synthetic peptide
  Seed: HIHIFSFTGEEMATK
HIHLFSMTFEEEATK

SEQ ID NO: 280745 - protein, 15 aa, Artificial Sequence
  Description of Artificial Sequence: Synthetic peptide
  Seed: HIHIFSFTGEEMATK
HIHLFSMTFEEFATK

SEQ ID NO: 280746 - protein, 15 aa, Artificial Sequence
  Description of Artificial Sequence: Synthetic peptide
  Seed: HIHIFSFTGEEMATK
HIHLFSMTFEEHATK

SEQ ID NO: 280747 - protein, 15 aa, Artificial Sequence
  Description of Artificial Sequence: Synthetic peptide
  Seed: HIHIFSFTGEEMATK
HIHLFSMTFEEIATK

SEQ ID NO: 280748 - protein, 15 aa, Artificial Sequence
  Description of Artificial Sequence: Synthetic peptide
  Seed: HIHIFSFTGEEMATK
HIHLFSMTFEEKATK

SEQ ID NO: 280749 - protein, 15 aa, Artificial Sequence
  Description of Artificial Sequence: Synthetic peptide
  Seed: HIHIFSFTGEEMATK
HIHLFSMTFEELATK

SEQ ID NO: 280750 - protein, 15 aa, Artificial Sequence
  Description of Artificial Sequence: Synthetic peptide
  Seed: HIHIFSFTGEEMATK
HIHLFSMTFEEMATK

SEQ ID NO: 280751 - protein, 15 aa, Artificial Sequence
  Description of Artificial Sequence: Synthetic peptide
  Seed: HIHIFSFTGEEMATK
HIHLFSMTFEENATK

SEQ ID NO: 280752 - protein, 15 aa, Artificial Sequence
  Description of Artificial Sequence: Synthetic peptide
  Seed: HIHIFSFTGEEMATK
HIHLFSMTFEEPATK

SEQ ID NO: 280753 - protein, 15 aa, Artificial Sequence
  Description of Artificial Sequence: Synthetic peptide
  Seed: HIHIFSFTGEEMATK
HIHLFSMTFEEQATK

SEQ ID NO: 280754 - protein, 15 aa, Artificial Sequence
  Description of Artificial Sequence: Synthetic peptide
  Seed: HIHIFSFTGEEMATK
HIHLFSMTFEERATK

SEQ ID NO: 280755 - protein, 15 aa, Artificial Sequence
  Description of Artificial Sequence: Synthetic peptide
  Seed: HIHIFSFTGEEMATK
HIHLFSMTFEESATK

SEQ ID NO: 280756 - protein, 15 aa, Artificial Sequence
  Description of Artificial Sequence: Synthetic peptide
  Seed: HIHIFSFTGEEMATK
HIHLFSMTFEETATK

SEQ ID NO: 280757 - protein, 15 aa, Artificial Sequence
  Description of Artificial Sequence: Synthetic peptide
  Seed: HIHIFSFTGEEMATK
HIHLFSMTFEEVATK

SEQ ID NO: 280758 - protein, 15 aa, Artificial Sequence
  Description of Artificial Sequence: Synthetic peptide
  Seed: HIHIFSFTGEEMATK
HIHLFSMTFEEYATK

SEQ ID NO: 280759 - protein, 15 aa, Artificial Sequence
  Description of Artificial Sequence: Synthetic peptide
  Seed: HIHIFSFTGEEMATK
HIHLFSMTGEEAATK

SEQ ID NO: 280760 - protein, 15 aa, Artificial Sequence
  Description of Artificial Sequence: Synthetic peptide
  Seed: HIHIFSFTGEEMATK
HIHLFSMTGEEIATK

SEQ ID NO: 280761 - protein, 15 aa, Artificial Sequence
  Description of Artificial Sequence: Synthetic peptide
  Seed: HIHIFSFTGEEMATK
HIHLFSMTGEELATK

SEQ ID NO: 280762 - protein, 15 aa, Artificial Sequence
  Description of Artificial Sequence: Synthetic peptide
  Seed: HIHIFSFTGEEMATK
HIHLFSMTGEEMATK

SEQ ID NO: 280763 - protein, 15 aa, Artificial Sequence
  Description of Artificial Sequence: Synthetic peptide
  Seed: HIHIFSFTGEEMATK
HIHLFSMTGEESATK

SEQ ID NO: 280764 - protein, 15 aa, Artificial Sequence
  Description of Artificial Sequence: Synthetic peptide
  Seed: HIHIFSFTGEEMATK
HIHLFSMTGEETATK

SEQ ID NO: 280765 - protein, 15 aa, Artificial Sequence
  Description of Artificial Sequence: Synthetic peptide
  Seed: HIHIFSFTGEEMATK
HIHLFSMTGEEVATK

SEQ ID NO: 280766 - protein, 15 aa, Artificial Sequence
  Description of Artificial Sequence: Synthetic peptide
  Seed: HIHIFSFTGEEMATK
HIHLFSMTIEEAATK

SEQ ID NO: 280767 - protein, 15 aa, Artificial Sequence
  Description of Artificial Sequence: Synthetic peptide
  Seed: HIHIFSFTGEEMATK
HIHLFSMTIEEHATK

SEQ ID NO: 280768 - protein, 15 aa, Artificial Sequence
  Description of Artificial Sequence: Synthetic peptide
  Seed: HIHIFSFTGEEMATK
HIHLFSMTIEEIATK

SEQ ID NO: 280769 - protein, 15 aa, Artificial Sequence
  Description of Artificial Sequence: Synthetic peptide
  Seed: HIHIFSFTGEEMATK
HIHLFSMTIEELATK

SEQ ID NO: 280770 - protein, 15 aa, Artificial Sequence
  Description of Artificial Sequence: Synthetic peptide
  Seed: HIHIFSFTGEEMATK
HIHLFSMTIEEMATK

SEQ ID NO: 280771 - protein, 15 aa, Artificial Sequence
  Description of Artificial Sequence: Synthetic peptide
  Seed: HIHIFSFTGEEMATK
HIHLFSMTIEENATK

SEQ ID NO: 280772 - protein, 15 aa, Artificial Sequence
  Description of Artificial Sequence: Synthetic peptide
  Seed: HIHIFSFTGEEMATK
HIHLFSMTIEESATK

SEQ ID NO: 280773 - protein, 15 aa, Artificial Sequence
  Description of Artificial Sequence: Synthetic peptide
  Seed: HIHIFSFTGEEMATK
HIHLFSMTIEETATK

SEQ ID NO: 280774 - protein, 15 aa, Artificial Sequence
  Description of Artificial Sequence: Synthetic peptide
  Seed: HIHIFSFTGEEMATK
HIHLFSMTIEEVATK

SEQ ID NO: 280775 - protein, 15 aa, Artificial Sequence
  Description of Artificial Sequence: Synthetic peptide
  Seed: HIHIFSFTGEEMATK
HIHLFSMTLEEFATK

SEQ ID NO: 280776 - protein, 15 aa, Artificial Sequence
  Description of Artificial Sequence: Synthetic peptide
  Seed: HIHIFSFTGEEMATK
HIHLFSMTLEEIATK

SEQ ID NO: 280777 - protein, 15 aa, Artificial Sequence
  Description of Artificial Sequence: Synthetic peptide
  Seed: HIHIFSFTGEEMATK
HIHLFSMTLEELATK

SEQ ID NO: 280778 - protein, 15 aa, Artificial Sequence
  Description of Artificial Sequence: Synthetic peptide
  Seed: HIHIFSFTGEEMATK
HIHLFSMTLEEMATK

SEQ ID NO: 280779 - protein, 15 aa, Artificial Sequence
  Description of Artificial Sequence: Synthetic peptide
  Seed: HIHIFSFTGEEMATK
HIHLFSMTLEEVATK

SEQ ID NO: 280780 - protein, 15 aa, Artificial Sequence
  Description of Artificial Sequence: Synthetic peptide
  Seed: HIHIFSFTGEEMATK
HIHLFSMTMEELATK

SEQ ID NO: 280781 - protein, 15 aa, Artificial Sequence
  Description of Artificial Sequence: Synthetic peptide
  Seed: HIHIFSFTGEEMATK
HIHLFSMTNEEIATK

SEQ ID NO: 280782 - protein, 15 aa, Artificial Sequence
  Description of Artificial Sequence: Synthetic peptide
  Seed: HIHIFSFTGEEMATK
HIHLFSMTNEELATK

SEQ ID NO: 280783 - protein, 15 aa, Artificial Sequence
  Description of Artificial Sequence: Synthetic peptide
  Seed: HIHIFSFTGEEMATK
HIHLFSMTNEEVATK

SEQ ID NO: 280784 - protein, 15 aa, Artificial Sequence
  Description of Artificial Sequence: Synthetic peptide
  Seed: HIHIFSFTGEEMATK
HIHLFSMTPEEAATK

SEQ ID NO: 280785 - protein, 15 aa, Artificial Sequence
  Description of Artificial Sequence: Synthetic peptide
  Seed: HIHIFSFTGEEMATK
HIHLFSMTPEEIATK

SEQ ID NO: 280786 - protein, 15 aa, Artificial Sequence
  Description of Artificial Sequence: Synthetic peptide
  Seed: HIHIFSFTGEEMATK
HIHLFSMTPEELATK

SEQ ID NO: 280787 - protein, 15 aa, Artificial Sequence
  Description of Artificial Sequence: Synthetic peptide
  Seed: HIHIFSFTGEEMATK
HIHLFSMTPEEMATK

SEQ ID NO: 280788 - protein, 15 aa, Artificial Sequence
  Description of Artificial Sequence: Synthetic peptide
  Seed: HIHIFSFTGEEMATK
HIHLFSMTPEENATK

SEQ ID NO: 280789 - protein, 15 aa, Artificial Sequence
  Description of Artificial Sequence: Synthetic peptide
  Seed: HIHIFSFTGEEMATK
HIHLFSMTPEESATK

SEQ ID NO: 280790 - protein, 15 aa, Artificial Sequence
  Description of Artificial Sequence: Synthetic peptide
  Seed: HIHIFSFTGEEMATK
HIHLFSMTPEETATK

SEQ ID NO: 280791 - protein, 15 aa, Artificial Sequence
  Description of Artificial Sequence: Synthetic peptide
  Seed: HIHIFSFTGEEMATK
HIHLFSMTPEEVATK

SEQ ID NO: 280792 - protein, 15 aa, Artificial Sequence
  Description of Artificial Sequence: Synthetic peptide
  Seed: HIHIFSFTGEEMATK
HIHLFSMTSEEAATK

SEQ ID NO: 280793 - protein, 15 aa, Artificial Sequence
  Description of Artificial Sequence: Synthetic peptide
  Seed: HIHIFSFTGEEMATK
HIHLFSMTSEEIATK

SEQ ID NO: 280794 - protein, 15 aa, Artificial Sequence
  Description of Artificial Sequence: Synthetic peptide
  Seed: HIHIFSFTGEEMATK
HIHLFSMTSEELATK

SEQ ID NO: 280795 - protein, 15 aa, Artificial Sequence
  Description of Artificial Sequence: Synthetic peptide
  Seed: HIHIFSFTGEEMATK
HIHLFSMTSEEMATK

SEQ ID NO: 280796 - protein, 15 aa, Artificial Sequence
  Description of Artificial Sequence: Synthetic peptide
  Seed: HIHIFSFTGEEMATK
HIHLFSMTSEENATK

SEQ ID NO: 280797 - protein, 15 aa, Artificial Sequence
  Description of Artificial Sequence: Synthetic peptide
  Seed: HIHIFSFTGEEMATK
HIHLFSMTSEESATK

SEQ ID NO: 280798 - protein, 15 aa, Artificial Sequence
  Description of Artificial Sequence: Synthetic peptide
  Seed: HIHIFSFTGEEMATK
HIHLFSMTSEETATK

SEQ ID NO: 280799 - protein, 15 aa, Artificial Sequence
  Description of Artificial Sequence: Synthetic peptide
  Seed: HIHIFSFTGEEMATK
HIHLFSMTSEEVATK

SEQ ID NO: 280800 - protein, 15 aa, Artificial Sequence
  Description of Artificial Sequence: Synthetic peptide
  Seed: HIHIFSFTGEEMATK
HIHLFSMTTEEAATK

SEQ ID NO: 280801 - protein, 15 aa, Artificial Sequence
  Description of Artificial Sequence: Synthetic peptide
  Seed: HIHIFSFTGEEMATK
HIHLFSMTTEEIATK

SEQ ID NO: 280802 - protein, 15 aa, Artificial Sequence
  Description of Artificial Sequence: Synthetic peptide
  Seed: HIHIFSFTGEEMATK
HIHLFSMTTEELATK

SEQ ID NO: 280803 - protein, 15 aa, Artificial Sequence
  Description of Artificial Sequence: Synthetic peptide
  Seed: HIHIFSFTGEEMATK
HIHLFSMTTEEMATK

SEQ ID NO: 280804 - protein, 15 aa, Artificial Sequence
  Description of Artificial Sequence: Synthetic peptide
  Seed: HIHIFSFTGEEMATK
HIHLFSMTTEENATK

SEQ ID NO: 280805 - protein, 15 aa, Artificial Sequence
  Description of Artificial Sequence: Synthetic peptide
  Seed: HIHIFSFTGEEMATK
HIHLFSMTTEESATK

SEQ ID NO: 280806 - protein, 15 aa, Artificial Sequence
  Description of Artificial Sequence: Synthetic peptide
  Seed: HIHIFSFTGEEMATK
HIHLFSMTTEETATK

SEQ ID NO: 280807 - protein, 15 aa, Artificial Sequence
  Description of Artificial Sequence: Synthetic peptide
  Seed: HIHIFSFTGEEMATK
HIHLFSMTTEEVATK

SEQ ID NO: 280808 - protein, 15 aa, Artificial Sequence
  Description of Artificial Sequence: Synthetic peptide
  Seed: HIHIFSFTGEEMATK
HIHLFSMTVEEAATK

SEQ ID NO: 280809 - protein, 15 aa, Artificial Sequence
  Description of Artificial Sequence: Synthetic peptide
  Seed: HIHIFSFTGEEMATK
HIHLFSMTVEEHATK

SEQ ID NO: 280810 - protein, 15 aa, Artificial Sequence
  Description of Artificial Sequence: Synthetic peptide
  Seed: HIHIFSFTGEEMATK
HIHLFSMTVEELATK

SEQ ID NO: 280811 - protein, 15 aa, Artificial Sequence
  Description of Artificial Sequence: Synthetic peptide
  Seed: HIHIFSFTGEEMATK
HIHLFSMTVEEMATK

SEQ ID NO: 280812 - protein, 15 aa, Artificial Sequence
  Description of Artificial Sequence: Synthetic peptide
  Seed: HIHIFSFTGEEMATK
HIHLFSMTVEENATK

SEQ ID NO: 280813 - protein, 15 aa, Artificial Sequence
  Description of Artificial Sequence: Synthetic peptide
  Seed: HIHIFSFTGEEMATK
HIHLFSMTVEESATK

SEQ ID NO: 280814 - protein, 15 aa, Artificial Sequence
  Description of Artificial Sequence: Synthetic peptide
  Seed: HIHIFSFTGEEMATK
HIHLFSMTVEETATK

SEQ ID NO: 280815 - protein, 15 aa, Artificial Sequence
  Description of Artificial Sequence: Synthetic peptide
  Seed: HIHIFSFTGEEMATK
HIHLFSMTVEEVATK

SEQ ID NO: 280816 - protein, 15 aa, Artificial Sequence
  Description of Artificial Sequence: Synthetic peptide
  Seed: HIHIFSFTGEEMATK
HIHLFSMTWEEFATK

SEQ ID NO: 280817 - protein, 15 aa, Artificial Sequence
  Description of Artificial Sequence: Synthetic peptide
  Seed: HIHIFSFTGEEMATK
HIHLFSMTWEEIATK

SEQ ID NO: 280818 - protein, 15 aa, Artificial Sequence
  Description of Artificial Sequence: Synthetic peptide
  Seed: HIHIFSFTGEEMATK
HIHLFSMTWEELATK

SEQ ID NO: 280819 - protein, 15 aa, Artificial Sequence
  Description of Artificial Sequence: Synthetic peptide
  Seed: HIHIFSFTGEEMATK
HIHLFSMTWEEMATK

SEQ ID NO: 280820 - protein, 15 aa, Artificial Sequence
  Description of Artificial Sequence: Synthetic peptide
  Seed: HIHIFSFTGEEMATK
HIHLFSMTWEEVATK

SEQ ID NO: 280821 - protein, 15 aa, Artificial Sequence
  Description of Artificial Sequence: Synthetic peptide
  Seed: HIHIFSFTGEEMATK
HIHLFSMTYEEFATK

SEQ ID NO: 280822 - protein, 15 aa, Artificial Sequence
  Description of Artificial Sequence: Synthetic peptide
  Seed: HIHIFSFTGEEMATK
HIHLFSMTYEEIATK

SEQ ID NO: 280823 - protein, 15 aa, Artificial Sequence
  Description of Artificial Sequence: Synthetic peptide
  Seed: HIHIFSFTGEEMATK
HIHLFSMTYEELATK

SEQ ID NO: 280824 - protein, 15 aa, Artificial Sequence
  Description of Artificial Sequence: Synthetic peptide
  Seed: HIHIFSFTGEEMATK
HIHLFSMTYEEMATK

SEQ ID NO: 280825 - protein, 15 aa, Artificial Sequence
  Description of Artificial Sequence: Synthetic peptide
  Seed: HIHIFSFTGEEMATK
HIHLFSMTYEEVATK

SEQ ID NO: 280826 - protein, 15 aa, Artificial Sequence
  Description of Artificial Sequence: Synthetic peptide
  Seed: HIHIFSFTGEEMATK
HIHLFSMTYEEYATK

SEQ ID NO: 280827 - protein, 15 aa, Artificial Sequence
  Description of Artificial Sequence: Synthetic peptide
  Seed: HIHIFSFTGEEMATK
HIHLFSNTFEEAATK

SEQ ID NO: 280828 - protein, 15 aa, Artificial Sequence
  Description of Artificial Sequence: Synthetic peptide
  Seed: HIHIFSFTGEEMATK
HIHLFSNTFEEFATK

SEQ ID NO: 280829 - protein, 15 aa, Artificial Sequence
  Description of Artificial Sequence: Synthetic peptide
  Seed: HIHIFSFTGEEMATK
HIHLFSNTFEEIATK

SEQ ID NO: 280830 - protein, 15 aa, Artificial Sequence
  Description of Artificial Sequence: Synthetic peptide
  Seed: HIHIFSFTGEEMATK
HIHLFSNTFEELATK

SEQ ID NO: 280831 - protein, 15 aa, Artificial Sequence
  Description of Artificial Sequence: Synthetic peptide
  Seed: HIHIFSFTGEEMATK
HIHLFSNTFEEMATK

SEQ ID NO: 280832 - protein, 15 aa, Artificial Sequence
  Description of Artificial Sequence: Synthetic peptide
  Seed: HIHIFSFTGEEMATK
HIHLFSNTFEESATK

SEQ ID NO: 280833 - protein, 15 aa, Artificial Sequence
  Description of Artificial Sequence: Synthetic peptide
  Seed: HIHIFSFTGEEMATK
HIHLFSNTFEETATK

SEQ ID NO: 280834 - protein, 15 aa, Artificial Sequence
  Description of Artificial Sequence: Synthetic peptide
  Seed: HIHIFSFTGEEMATK
HIHLFSNTFEEVATK

SEQ ID NO: 280835 - protein, 15 aa, Artificial Sequence
  Description of Artificial Sequence: Synthetic peptide
  Seed: HIHIFSFTGEEMATK
HIHLFSNTLEELATK

SEQ ID NO: 280836 - protein, 15 aa, Artificial Sequence
  Description of Artificial Sequence: Synthetic peptide
  Seed: HIHIFSFTGEEMATK
HIHLFSNTYEELATK

SEQ ID NO: 280837 - protein, 15 aa, Artificial Sequence
  Description of Artificial Sequence: Synthetic peptide
  Seed: HIHIFSFTGEEMATK
HIHLFSPTFEEIATK

SEQ ID NO: 280838 - protein, 15 aa, Artificial Sequence
  Description of Artificial Sequence: Synthetic peptide
  Seed: HIHIFSFTGEEMATK
HIHLFSPTFEELATK

SEQ ID NO: 280839 - protein, 15 aa, Artificial Sequence
  Description of Artificial Sequence: Synthetic peptide
  Seed: HIHIFSFTGEEMATK
HIHLFSQTFEEAATK

SEQ ID NO: 280840 - protein, 15 aa, Artificial Sequence
  Description of Artificial Sequence: Synthetic peptide
  Seed: HIHIFSFTGEEMATK
HIHLFSQTFEEFATK

SEQ ID NO: 280841 - protein, 15 aa, Artificial Sequence
  Description of Artificial Sequence: Synthetic peptide
  Seed: HIHIFSFTGEEMATK
HIHLFSQTFEEIATK

SEQ ID NO: 280842 - protein, 15 aa, Artificial Sequence
  Description of Artificial Sequence: Synthetic peptide
  Seed: HIHIFSFTGEEMATK
HIHLFSQTFEELATK

SEQ ID NO: 280843 - protein, 15 aa, Artificial Sequence
  Description of Artificial Sequence: Synthetic peptide
  Seed: HIHIFSFTGEEMATK
HIHLFSQTFEEMATK

SEQ ID NO: 280844 - protein, 15 aa, Artificial Sequence
  Description of Artificial Sequence: Synthetic peptide
  Seed: HIHIFSFTGEEMATK
HIHLFSQTFEESATK

SEQ ID NO: 280845 - protein, 15 aa, Artificial Sequence
  Description of Artificial Sequence: Synthetic peptide
  Seed: HIHIFSFTGEEMATK
HIHLFSQTFEETATK

SEQ ID NO: 280846 - protein, 15 aa, Artificial Sequence
  Description of Artificial Sequence: Synthetic peptide
  Seed: HIHIFSFTGEEMATK
HIHLFSQTFEEVATK

SEQ ID NO: 280847 - protein, 15 aa, Artificial Sequence
  Description of Artificial Sequence: Synthetic peptide
  Seed: HIHIFSFTGEEMATK
HIHLFSQTFEEYATK

SEQ ID NO: 280848 - protein, 15 aa, Artificial Sequence
  Description of Artificial Sequence: Synthetic peptide
  Seed: HIHIFSFTGEEMATK
HIHLFSQTLEEIATK

SEQ ID NO: 280849 - protein, 15 aa, Artificial Sequence
  Description of Artificial Sequence: Synthetic peptide
  Seed: HIHIFSFTGEEMATK
HIHLFSQTLEELATK

SEQ ID NO: 280850 - protein, 15 aa, Artificial Sequence
  Description of Artificial Sequence: Synthetic peptide
  Seed: HIHIFSFTGEEMATK
HIHLFSQTWEEIATK

SEQ ID NO: 280851 - protein, 15 aa, Artificial Sequence
  Description of Artificial Sequence: Synthetic peptide
  Seed: HIHIFSFTGEEMATK
HIHLFSQTWEELATK

SEQ ID NO: 280852 - protein, 15 aa, Artificial Sequence
  Description of Artificial Sequence: Synthetic peptide
  Seed: HIHIFSFTGEEMATK
HIHLFSQTWEEVATK

SEQ ID NO: 280853 - protein, 15 aa, Artificial Sequence
  Description of Artificial Sequence: Synthetic peptide
  Seed: HIHIFSFTGEEMATK
HIHLFSQTYEEIATK

SEQ ID NO: 280854 - protein, 15 aa, Artificial Sequence
  Description of Artificial Sequence: Synthetic peptide
  Seed: HIHIFSFTGEEMATK
HIHLFSQTYEELATK

SEQ ID NO: 280855 - protein, 15 aa, Artificial Sequence
  Description of Artificial Sequence: Synthetic peptide
  Seed: HIHIFSFTGEEMATK
HIHLFSQTYEEVATK

SEQ ID NO: 280856 - protein, 15 aa, Artificial Sequence
  Description of Artificial Sequence: Synthetic peptide
  Seed: HIHIFSFTGEEMATK
HIHLFSRTFEEFATK

SEQ ID NO: 280857 - protein, 15 aa, Artificial Sequence
  Description of Artificial Sequence: Synthetic peptide
  Seed: HIHIFSFTGEEMATK
HIHLFSRTFEEIATK

SEQ ID NO: 280858 - protein, 15 aa, Artificial Sequence
  Description of Artificial Sequence: Synthetic peptide
  Seed: HIHIFSFTGEEMATK
HIHLFSRTFEELATK

SEQ ID NO: 280859 - protein, 15 aa, Artificial Sequence
  Description of Artificial Sequence: Synthetic peptide
  Seed: HIHIFSFTGEEMATK
HIHLFSRTFEEMATK

SEQ ID NO: 280860 - protein, 15 aa, Artificial Sequence
  Description of Artificial Sequence: Synthetic peptide
  Seed: HIHIFSFTGEEMATK
HIHLFSRTFEEVATK

SEQ ID NO: 280861 - protein, 15 aa, Artificial Sequence
  Description of Artificial Sequence: Synthetic peptide
  Seed: HIHIFSFTGEEMATK
HIHLFSSTFEEAATK

SEQ ID NO: 280862 - protein, 15 aa, Artificial Sequence
  Description of Artificial Sequence: Synthetic peptide
  Seed: HIHIFSFTGEEMATK
HIHLFSSTFEECATK

SEQ ID NO: 280863 - protein, 15 aa, Artificial Sequence
  Description of Artificial Sequence: Synthetic peptide
  Seed: HIHIFSFTGEEMATK
HIHLFSSTFEEDATK

SEQ ID NO: 280864 - protein, 15 aa, Artificial Sequence
  Description of Artificial Sequence: Synthetic peptide
  Seed: HIHIFSFTGEEMATK
HIHLFSSTFEEEATK

SEQ ID NO: 280865 - protein, 15 aa, Artificial Sequence
  Description of Artificial Sequence: Synthetic peptide
  Seed: HIHIFSFTGEEMATK
HIHLFSSTFEEFATK

SEQ ID NO: 280866 - protein, 15 aa, Artificial Sequence
  Description of Artificial Sequence: Synthetic peptide
  Seed: HIHIFSFTGEEMATK
HIHLFSSTFEEHATK

SEQ ID NO: 280867 - protein, 15 aa, Artificial Sequence
  Description of Artificial Sequence: Synthetic peptide
  Seed: HIHIFSFTGEEMATK
HIHLFSSTFEEIATK

SEQ ID NO: 280868 - protein, 15 aa, Artificial Sequence
  Description of Artificial Sequence: Synthetic peptide
  Seed: HIHIFSFTGEEMATK
HIHLFSSTFEELATK

SEQ ID NO: 280869 - protein, 15 aa, Artificial Sequence
  Description of Artificial Sequence: Synthetic peptide
  Seed: HIHIFSFTGEEMATK
HIHLFSSTFEEMATK

SEQ ID NO: 280870 - protein, 15 aa, Artificial Sequence
  Description of Artificial Sequence: Synthetic peptide
  Seed: HIHIFSFTGEEMATK
HIHLFSSTFEENATK

SEQ ID NO: 280871 - protein, 15 aa, Artificial Sequence
  Description of Artificial Sequence: Synthetic peptide
  Seed: HIHIFSFTGEEMATK
HIHLFSSTFEEPATK

SEQ ID NO: 280872 - protein, 15 aa, Artificial Sequence
  Description of Artificial Sequence: Synthetic peptide
  Seed: HIHIFSFTGEEMATK
HIHLFSSTFEEQATK

SEQ ID NO: 280873 - protein, 15 aa, Artificial Sequence
  Description of Artificial Sequence: Synthetic peptide
  Seed: HIHIFSFTGEEMATK
HIHLFSSTFEESATK

SEQ ID NO: 280874 - protein, 15 aa, Artificial Sequence
  Description of Artificial Sequence: Synthetic peptide
  Seed: HIHIFSFTGEEMATK
HIHLFSSTFEETATK

SEQ ID NO: 280875 - protein, 15 aa, Artificial Sequence
  Description of Artificial Sequence: Synthetic peptide
  Seed: HIHIFSFTGEEMATK
HIHLFSSTFEEVATK

SEQ ID NO: 280876 - protein, 15 aa, Artificial Sequence
  Description of Artificial Sequence: Synthetic peptide
  Seed: HIHIFSFTGEEMATK
HIHLFSSTFEEWATK

SEQ ID NO: 280877 - protein, 15 aa, Artificial Sequence
  Description of Artificial Sequence: Synthetic peptide
  Seed: HIHIFSFTGEEMATK
HIHLFSSTFEEYATK

SEQ ID NO: 280878 - protein, 15 aa, Artificial Sequence
  Description of Artificial Sequence: Synthetic peptide
  Seed: HIHIFSFTGEEMATK
HIHLFSSTIEEIATK

SEQ ID NO: 280879 - protein, 15 aa, Artificial Sequence
  Description of Artificial Sequence: Synthetic peptide
  Seed: HIHIFSFTGEEMATK
HIHLFSSTIEELATK

SEQ ID NO: 280880 - protein, 15 aa, Artificial Sequence
  Description of Artificial Sequence: Synthetic peptide
  Seed: HIHIFSFTGEEMATK
HIHLFSSTIEEVATK

SEQ ID NO: 280881 - protein, 15 aa, Artificial Sequence
  Description of Artificial Sequence: Synthetic peptide
  Seed: HIHIFSFTGEEMATK
HIHLFSSTLEEFATK

SEQ ID NO: 280882 - protein, 15 aa, Artificial Sequence
  Description of Artificial Sequence: Synthetic peptide
  Seed: HIHIFSFTGEEMATK
HIHLFSSTLEEIATK

SEQ ID NO: 280883 - protein, 15 aa, Artificial Sequence
  Description of Artificial Sequence: Synthetic peptide
  Seed: HIHIFSFTGEEMATK
HIHLFSSTLEELATK

SEQ ID NO: 280884 - protein, 15 aa, Artificial Sequence
  Description of Artificial Sequence: Synthetic peptide
  Seed: HIHIFSFTGEEMATK
HIHLFSSTLEEMATK

SEQ ID NO: 280885 - protein, 15 aa, Artificial Sequence
  Description of Artificial Sequence: Synthetic peptide
  Seed: HIHIFSFTGEEMATK
HIHLFSSTLEEVATK

SEQ ID NO: 280886 - protein, 15 aa, Artificial Sequence
  Description of Artificial Sequence: Synthetic peptide
  Seed: HIHIFSFTGEEMATK
HIHLFSSTMEEIATK

SEQ ID NO: 280887 - protein, 15 aa, Artificial Sequence
  Description of Artificial Sequence: Synthetic peptide
  Seed: HIHIFSFTGEEMATK
HIHLFSSTMEELATK

SEQ ID NO: 280888 - protein, 15 aa, Artificial Sequence
  Description of Artificial Sequence: Synthetic peptide
  Seed: HIHIFSFTGEEMATK
HIHLFSSTWEEFATK

SEQ ID NO: 280889 - protein, 15 aa, Artificial Sequence
  Description of Artificial Sequence: Synthetic peptide
  Seed: HIHIFSFTGEEMATK
HIHLFSSTWEEIATK

SEQ ID NO: 280890 - protein, 15 aa, Artificial Sequence
  Description of Artificial Sequence: Synthetic peptide
  Seed: HIHIFSFTGEEMATK
HIHLFSSTWEELATK

SEQ ID NO: 280891 - protein, 15 aa, Artificial Sequence
  Description of Artificial Sequence: Synthetic peptide
  Seed: HIHIFSFTGEEMATK
HIHLFSSTWEEMATK

SEQ ID NO: 280892 - protein, 15 aa, Artificial Sequence
  Description of Artificial Sequence: Synthetic peptide
  Seed: HIHIFSFTGEEMATK
HIHLFSSTWEEVATK

SEQ ID NO: 280893 - protein, 15 aa, Artificial Sequence
  Description of Artificial Sequence: Synthetic peptide
  Seed: HIHIFSFTGEEMATK
HIHLFSSTYEEFATK

SEQ ID NO: 280894 - protein, 15 aa, Artificial Sequence
  Description of Artificial Sequence: Synthetic peptide
  Seed: HIHIFSFTGEEMATK
HIHLFSSTYEEIATK

SEQ ID NO: 280895 - protein, 15 aa, Artificial Sequence
  Description of Artificial Sequence: Synthetic peptide
  Seed: HIHIFSFTGEEMATK
HIHLFSSTYEELATK

SEQ ID NO: 280896 - protein, 15 aa, Artificial Sequence
  Description of Artificial Sequence: Synthetic peptide
  Seed: HIHIFSFTGEEMATK
HIHLFSSTYEEMATK

SEQ ID NO: 280897 - protein, 15 aa, Artificial Sequence
  Description of Artificial Sequence: Synthetic peptide
  Seed: HIHIFSFTGEEMATK
HIHLFSSTYEEVATK

SEQ ID NO: 280898 - protein, 15 aa, Artificial Sequence
  Description of Artificial Sequence: Synthetic peptide
  Seed: HIHIFSFTGEEMATK
HIHLFSTTFEEAATK

SEQ ID NO: 280899 - protein, 15 aa, Artificial Sequence
  Description of Artificial Sequence: Synthetic peptide
  Seed: HIHIFSFTGEEMATK
HIHLFSTTFEECATK

SEQ ID NO: 280900 - protein, 15 aa, Artificial Sequence
  Description of Artificial Sequence: Synthetic peptide
  Seed: HIHIFSFTGEEMATK
HIHLFSTTFEEDATK

SEQ ID NO: 280901 - protein, 15 aa, Artificial Sequence
  Description of Artificial Sequence: Synthetic peptide
  Seed: HIHIFSFTGEEMATK
HIHLFSTTFEEEATK

SEQ ID NO: 280902 - protein, 15 aa, Artificial Sequence
  Description of Artificial Sequence: Synthetic peptide
  Seed: HIHIFSFTGEEMATK
HIHLFSTTFEEFATK

SEQ ID NO: 280903 - protein, 15 aa, Artificial Sequence
  Description of Artificial Sequence: Synthetic peptide
  Seed: HIHIFSFTGEEMATK
HIHLFSTTFEEGATK

SEQ ID NO: 280904 - protein, 15 aa, Artificial Sequence
  Description of Artificial Sequence: Synthetic peptide
  Seed: HIHIFSFTGEEMATK
HIHLFSTTFEEHATK

SEQ ID NO: 280905 - protein, 15 aa, Artificial Sequence
  Description of Artificial Sequence: Synthetic peptide
  Seed: HIHIFSFTGEEMATK
HIHLFSTTFEEIATK

SEQ ID NO: 280906 - protein, 15 aa, Artificial Sequence
  Description of Artificial Sequence: Synthetic peptide
  Seed: HIHIFSFTGEEMATK
HIHLFSTTFEEKATK

SEQ ID NO: 280907 - protein, 15 aa, Artificial Sequence
  Description of Artificial Sequence: Synthetic peptide
  Seed: HIHIFSFTGEEMATK
HIHLFSTTFEELATK

SEQ ID NO: 280908 - protein, 15 aa, Artificial Sequence
  Description of Artificial Sequence: Synthetic peptide
  Seed: HIHIFSFTGEEMATK
HIHLFSTTFEEMATK

SEQ ID NO: 280909 - protein, 15 aa, Artificial Sequence
  Description of Artificial Sequence: Synthetic peptide
  Seed: HIHIFSFTGEEMATK
HIHLFSTTFEENATK

SEQ ID NO: 280910 - protein, 15 aa, Artificial Sequence
  Description of Artificial Sequence: Synthetic peptide
  Seed: HIHIFSFTGEEMATK
HIHLFSTTFEEPATK

SEQ ID NO: 280911 - protein, 15 aa, Artificial Sequence
  Description of Artificial Sequence: Synthetic peptide
  Seed: HIHIFSFTGEEMATK
HIHLFSTTFEEQATK

SEQ ID NO: 280912 - protein, 15 aa, Artificial Sequence
  Description of Artificial Sequence: Synthetic peptide
  Seed: HIHIFSFTGEEMATK
HIHLFSTTFEERATK

SEQ ID NO: 280913 - protein, 15 aa, Artificial Sequence
  Description of Artificial Sequence: Synthetic peptide
  Seed: HIHIFSFTGEEMATK
HIHLFSTTFEESATK

SEQ ID NO: 280914 - protein, 15 aa, Artificial Sequence
  Description of Artificial Sequence: Synthetic peptide
  Seed: HIHIFSFTGEEMATK
HIHLFSTTFEETATK

SEQ ID NO: 280915 - protein, 15 aa, Artificial Sequence
  Description of Artificial Sequence: Synthetic peptide
  Seed: HIHIFSFTGEEMATK
HIHLFSTTFEEVATK

SEQ ID NO: 280916 - protein, 15 aa, Artificial Sequence
  Description of Artificial Sequence: Synthetic peptide
  Seed: HIHIFSFTGEEMATK
HIHLFSTTFEEWATK

SEQ ID NO: 280917 - protein, 15 aa, Artificial Sequence
  Description of Artificial Sequence: Synthetic peptide
  Seed: HIHIFSFTGEEMATK
HIHLFSTTFEEYATK

SEQ ID NO: 280918 - protein, 15 aa, Artificial Sequence
  Description of Artificial Sequence: Synthetic peptide
  Seed: HIHIFSFTGEEMATK
HIHLFSTTIEEFATK

SEQ ID NO: 280919 - protein, 15 aa, Artificial Sequence
  Description of Artificial Sequence: Synthetic peptide
  Seed: HIHIFSFTGEEMATK
HIHLFSTTIEEIATK

SEQ ID NO: 280920 - protein, 15 aa, Artificial Sequence
  Description of Artificial Sequence: Synthetic peptide
  Seed: HIHIFSFTGEEMATK
HIHLFSTTIEELATK

SEQ ID NO: 280921 - protein, 15 aa, Artificial Sequence
  Description of Artificial Sequence: Synthetic peptide
  Seed: HIHIFSFTGEEMATK
HIHLFSTTIEEVATK

SEQ ID NO: 280922 - protein, 15 aa, Artificial Sequence
  Description of Artificial Sequence: Synthetic peptide
  Seed: HIHIFSFTGEEMATK
HIHLFSTTLEEFATK

SEQ ID NO: 280923 - protein, 15 aa, Artificial Sequence
  Description of Artificial Sequence: Synthetic peptide
  Seed: HIHIFSFTGEEMATK
HIHLFSTTLEEIATK

SEQ ID NO: 280924 - protein, 15 aa, Artificial Sequence
  Description of Artificial Sequence: Synthetic peptide
  Seed: HIHIFSFTGEEMATK
HIHLFSTTLEELATK

SEQ ID NO: 280925 - protein, 15 aa, Artificial Sequence
  Description of Artificial Sequence: Synthetic peptide
  Seed: HIHIFSFTGEEMATK
HIHLFSTTLEEMATK

SEQ ID NO: 280926 - protein, 15 aa, Artificial Sequence
  Description of Artificial Sequence: Synthetic peptide
  Seed: HIHIFSFTGEEMATK
HIHLFSTTLEEVATK

SEQ ID NO: 280927 - protein, 15 aa, Artificial Sequence
  Description of Artificial Sequence: Synthetic peptide
  Seed: HIHIFSFTGEEMATK
HIHLFSTTMEEFATK

SEQ ID NO: 280928 - protein, 15 aa, Artificial Sequence
  Description of Artificial Sequence: Synthetic peptide
  Seed: HIHIFSFTGEEMATK
HIHLFSTTMEEIATK

SEQ ID NO: 280929 - protein, 15 aa, Artificial Sequence
  Description of Artificial Sequence: Synthetic peptide
  Seed: HIHIFSFTGEEMATK
HIHLFSTTMEELATK

SEQ ID NO: 280930 - protein, 15 aa, Artificial Sequence
  Description of Artificial Sequence: Synthetic peptide
  Seed: HIHIFSFTGEEMATK
HIHLFSTTMEEVATK

SEQ ID NO: 280931 - protein, 15 aa, Artificial Sequence
  Description of Artificial Sequence: Synthetic peptide
  Seed: HIHIFSFTGEEMATK
HIHLFSTTVEELATK

SEQ ID NO: 280932 - protein, 15 aa, Artificial Sequence
  Description of Artificial Sequence: Synthetic peptide
  Seed: HIHIFSFTGEEMATK
HIHLFSTTWEEFATK

SEQ ID NO: 280933 - protein, 15 aa, Artificial Sequence
  Description of Artificial Sequence: Synthetic peptide
  Seed: HIHIFSFTGEEMATK
HIHLFSTTWEEIATK

SEQ ID NO: 280934 - protein, 15 aa, Artificial Sequence
  Description of Artificial Sequence: Synthetic peptide
  Seed: HIHIFSFTGEEMATK
HIHLFSTTWEELATK

SEQ ID NO: 280935 - protein, 15 aa, Artificial Sequence
  Description of Artificial Sequence: Synthetic peptide
  Seed: HIHIFSFTGEEMATK
HIHLFSTTWEEMATK

SEQ ID NO: 280936 - protein, 15 aa, Artificial Sequence
  Description of Artificial Sequence: Synthetic peptide
  Seed: HIHIFSFTGEEMATK
HIHLFSTTWEEVATK

SEQ ID NO: 280937 - protein, 15 aa, Artificial Sequence
  Description of Artificial Sequence: Synthetic peptide
  Seed: HIHIFSFTGEEMATK
HIHLFSTTWEEYATK

SEQ ID NO: 280938 - protein, 15 aa, Artificial Sequence
  Description of Artificial Sequence: Synthetic peptide
  Seed: HIHIFSFTGEEMATK
HIHLFSTTYEEAATK

SEQ ID NO: 280939 - protein, 15 aa, Artificial Sequence
  Description of Artificial Sequence: Synthetic peptide
  Seed: HIHIFSFTGEEMATK
HIHLFSTTYEEFATK

SEQ ID NO: 280940 - protein, 15 aa, Artificial Sequence
  Description of Artificial Sequence: Synthetic peptide
  Seed: HIHIFSFTGEEMATK
HIHLFSTTYEEIATK

SEQ ID NO: 280941 - protein, 15 aa, Artificial Sequence
  Description of Artificial Sequence: Synthetic peptide
  Seed: HIHIFSFTGEEMATK
HIHLFSTTYEELATK

SEQ ID NO: 280942 - protein, 15 aa, Artificial Sequence
  Description of Artificial Sequence: Synthetic peptide
  Seed: HIHIFSFTGEEMATK
HIHLFSTTYEEMATK

SEQ ID NO: 280943 - protein, 15 aa, Artificial Sequence
  Description of Artificial Sequence: Synthetic peptide
  Seed: HIHIFSFTGEEMATK
HIHLFSTTYEETATK

SEQ ID NO: 280944 - protein, 15 aa, Artificial Sequence
  Description of Artificial Sequence: Synthetic peptide
  Seed: HIHIFSFTGEEMATK
HIHLFSTTYEEVATK

SEQ ID NO: 280945 - protein, 15 aa, Artificial Sequence
  Description of Artificial Sequence: Synthetic peptide
  Seed: HIHIFSFTGEEMATK
HIHLFSTTYEEYATK

SEQ ID NO: 280946 - protein, 15 aa, Artificial Sequence
  Description of Artificial Sequence: Synthetic peptide
  Seed: HIHIFSFTGEEMATK
HIHLFSVTAEELATK

SEQ ID NO: 280947 - protein, 15 aa, Artificial Sequence
  Description of Artificial Sequence: Synthetic peptide
  Seed: HIHIFSFTGEEMATK
HIHLFSVTAEEVATK

SEQ ID NO: 280948 - protein, 15 aa, Artificial Sequence
  Description of Artificial Sequence: Synthetic peptide
  Seed: HIHIFSFTGEEMATK
HIHLFSVTFEEAATK

SEQ ID NO: 280949 - protein, 15 aa, Artificial Sequence
  Description of Artificial Sequence: Synthetic peptide
  Seed: HIHIFSFTGEEMATK
HIHLFSVTFEECATK

SEQ ID NO: 280950 - protein, 15 aa, Artificial Sequence
  Description of Artificial Sequence: Synthetic peptide
  Seed: HIHIFSFTGEEMATK
HIHLFSVTFEEDATK

SEQ ID NO: 280951 - protein, 15 aa, Artificial Sequence
  Description of Artificial Sequence: Synthetic peptide
  Seed: HIHIFSFTGEEMATK
HIHLFSVTFEEEATK

SEQ ID NO: 280952 - protein, 15 aa, Artificial Sequence
  Description of Artificial Sequence: Synthetic peptide
  Seed: HIHIFSFTGEEMATK
HIHLFSVTFEEFATK

SEQ ID NO: 280953 - protein, 15 aa, Artificial Sequence
  Description of Artificial Sequence: Synthetic peptide
  Seed: HIHIFSFTGEEMATK
HIHLFSVTFEEGATK

SEQ ID NO: 280954 - protein, 15 aa, Artificial Sequence
  Description of Artificial Sequence: Synthetic peptide
  Seed: HIHIFSFTGEEMATK
HIHLFSVTFEEHATK

SEQ ID NO: 280955 - protein, 15 aa, Artificial Sequence
  Description of Artificial Sequence: Synthetic peptide
  Seed: HIHIFSFTGEEMATK
HIHLFSVTFEEIATK

SEQ ID NO: 280956 - protein, 15 aa, Artificial Sequence
  Description of Artificial Sequence: Synthetic peptide
  Seed: HIHIFSFTGEEMATK
HIHLFSVTFEEKATK

SEQ ID NO: 280957 - protein, 15 aa, Artificial Sequence
  Description of Artificial Sequence: Synthetic peptide
  Seed: HIHIFSFTGEEMATK
HIHLFSVTFEELATK

SEQ ID NO: 280958 - protein, 15 aa, Artificial Sequence
  Description of Artificial Sequence: Synthetic peptide
  Seed: HIHIFSFTGEEMATK
HIHLFSVTFEEMATK

SEQ ID NO: 280959 - protein, 15 aa, Artificial Sequence
  Description of Artificial Sequence: Synthetic peptide
  Seed: HIHIFSFTGEEMATK
HIHLFSVTFEENATK

SEQ ID NO: 280960 - protein, 15 aa, Artificial Sequence
  Description of Artificial Sequence: Synthetic peptide
  Seed: HIHIFSFTGEEMATK
HIHLFSVTFEEPATK

SEQ ID NO: 280961 - protein, 15 aa, Artificial Sequence
  Description of Artificial Sequence: Synthetic peptide
  Seed: HIHIFSFTGEEMATK
HIHLFSVTFEEQATK

SEQ ID NO: 280962 - protein, 15 aa, Artificial Sequence
  Description of Artificial Sequence: Synthetic peptide
  Seed: HIHIFSFTGEEMATK
HIHLFSVTFEERATK

SEQ ID NO: 280963 - protein, 15 aa, Artificial Sequence
  Description of Artificial Sequence: Synthetic peptide
  Seed: HIHIFSFTGEEMATK
HIHLFSVTFEESATK

SEQ ID NO: 280964 - protein, 15 aa, Artificial Sequence
  Description of Artificial Sequence: Synthetic peptide
  Seed: HIHIFSFTGEEMATK
HIHLFSVTFEETATK

SEQ ID NO: 280965 - protein, 15 aa, Artificial Sequence
  Description of Artificial Sequence: Synthetic peptide
  Seed: HIHIFSFTGEEMATK
HIHLFSVTFEEVATK

SEQ ID NO: 280966 - protein, 15 aa, Artificial Sequence
  Description of Artificial Sequence: Synthetic peptide
  Seed: HIHIFSFTGEEMATK
HIHLFSVTFEEWATK

SEQ ID NO: 280967 - protein, 15 aa, Artificial Sequence
  Description of Artificial Sequence: Synthetic peptide
  Seed: HIHIFSFTGEEMATK
HIHLFSVTFEEYATK

SEQ ID NO: 280968 - protein, 15 aa, Artificial Sequence
  Description of Artificial Sequence: Synthetic peptide
  Seed: HIHIFSFTGEEMATK
HIHLFSVTIEEFATK

SEQ ID NO: 280969 - protein, 15 aa, Artificial Sequence
  Description of Artificial Sequence: Synthetic peptide
  Seed: HIHIFSFTGEEMATK
HIHLFSVTIEEIATK

SEQ ID NO: 280970 - protein, 15 aa, Artificial Sequence
  Description of Artificial Sequence: Synthetic peptide
  Seed: HIHIFSFTGEEMATK
HIHLFSVTIEELATK

SEQ ID NO: 280971 - protein, 15 aa, Artificial Sequence
  Description of Artificial Sequence: Synthetic peptide
  Seed: HIHIFSFTGEEMATK
HIHLFSVTIEEVATK

SEQ ID NO: 280972 - protein, 15 aa, Artificial Sequence
  Description of Artificial Sequence: Synthetic peptide
  Seed: HIHIFSFTGEEMATK
HIHLFSVTLEEFATK

SEQ ID NO: 280973 - protein, 15 aa, Artificial Sequence
  Description of Artificial Sequence: Synthetic peptide
  Seed: HIHIFSFTGEEMATK
HIHLFSVTLEEIATK

SEQ ID NO: 280974 - protein, 15 aa, Artificial Sequence
  Description of Artificial Sequence: Synthetic peptide
  Seed: HIHIFSFTGEEMATK
HIHLFSVTLEELATK

SEQ ID NO: 280975 - protein, 15 aa, Artificial Sequence
  Description of Artificial Sequence: Synthetic peptide
  Seed: HIHIFSFTGEEMATK
HIHLFSVTLEEMATK

SEQ ID NO: 280976 - protein, 15 aa, Artificial Sequence
  Description of Artificial Sequence: Synthetic peptide
  Seed: HIHIFSFTGEEMATK
HIHLFSVTLEETATK

SEQ ID NO: 280977 - protein, 15 aa, Artificial Sequence
  Description of Artificial Sequence: Synthetic peptide
  Seed: HIHIFSFTGEEMATK
HIHLFSVTLEEVATK

SEQ ID NO: 280978 - protein, 15 aa, Artificial Sequence
  Description of Artificial Sequence: Synthetic peptide
  Seed: HIHIFSFTGEEMATK
HIHLFSVTMEEFATK

SEQ ID NO: 280979 - protein, 15 aa, Artificial Sequence
  Description of Artificial Sequence: Synthetic peptide
  Seed: HIHIFSFTGEEMATK
HIHLFSVTMEEIATK

SEQ ID NO: 280980 - protein, 15 aa, Artificial Sequence
  Description of Artificial Sequence: Synthetic peptide
  Seed: HIHIFSFTGEEMATK
HIHLFSVTMEELATK

SEQ ID NO: 280981 - protein, 15 aa, Artificial Sequence
  Description of Artificial Sequence: Synthetic peptide
  Seed: HIHIFSFTGEEMATK
HIHLFSVTMEEVATK

SEQ ID NO: 280982 - protein, 15 aa, Artificial Sequence
  Description of Artificial Sequence: Synthetic peptide
  Seed: HIHIFSFTGEEMATK
HIHLFSVTWEEAATK

SEQ ID NO: 280983 - protein, 15 aa, Artificial Sequence
  Description of Artificial Sequence: Synthetic peptide
  Seed: HIHIFSFTGEEMATK
HIHLFSVTWEEFATK

SEQ ID NO: 280984 - protein, 15 aa, Artificial Sequence
  Description of Artificial Sequence: Synthetic peptide
  Seed: HIHIFSFTGEEMATK
HIHLFSVTWEEIATK

SEQ ID NO: 280985 - protein, 15 aa, Artificial Sequence
  Description of Artificial Sequence: Synthetic peptide
  Seed: HIHIFSFTGEEMATK
HIHLFSVTWEELATK

SEQ ID NO: 280986 - protein, 15 aa, Artificial Sequence
  Description of Artificial Sequence: Synthetic peptide
  Seed: HIHIFSFTGEEMATK
HIHLFSVTWEEMATK

SEQ ID NO: 280987 - protein, 15 aa, Artificial Sequence
  Description of Artificial Sequence: Synthetic peptide
  Seed: HIHIFSFTGEEMATK
HIHLFSVTWEETATK

SEQ ID NO: 280988 - protein, 15 aa, Artificial Sequence
  Description of Artificial Sequence: Synthetic peptide
  Seed: HIHIFSFTGEEMATK
HIHLFSVTWEEVATK

SEQ ID NO: 280989 - protein, 15 aa, Artificial Sequence
  Description of Artificial Sequence: Synthetic peptide
  Seed: HIHIFSFTGEEMATK
HIHLFSVTWEEYATK

SEQ ID NO: 280990 - protein, 15 aa, Artificial Sequence
  Description of Artificial Sequence: Synthetic peptide
  Seed: HIHIFSFTGEEMATK
HIHLFSVTYEEAATK

SEQ ID NO: 280991 - protein, 15 aa, Artificial Sequence
  Description of Artificial Sequence: Synthetic peptide
  Seed: HIHIFSFTGEEMATK
HIHLFSVTYEEFATK

SEQ ID NO: 280992 - protein, 15 aa, Artificial Sequence
  Description of Artificial Sequence: Synthetic peptide
  Seed: HIHIFSFTGEEMATK
HIHLFSVTYEEIATK

SEQ ID NO: 280993 - protein, 15 aa, Artificial Sequence
  Description of Artificial Sequence: Synthetic peptide
  Seed: HIHIFSFTGEEMATK
HIHLFSVTYEELATK

SEQ ID NO: 280994 - protein, 15 aa, Artificial Sequence
  Description of Artificial Sequence: Synthetic peptide
  Seed: HIHIFSFTGEEMATK
HIHLFSVTYEEMATK

SEQ ID NO: 280995 - protein, 15 aa, Artificial Sequence
  Description of Artificial Sequence: Synthetic peptide
  Seed: HIHIFSFTGEEMATK
HIHLFSVTYEESATK

SEQ ID NO: 280996 - protein, 15 aa, Artificial Sequence
  Description of Artificial Sequence: Synthetic peptide
  Seed: HIHIFSFTGEEMATK
HIHLFSVTYEETATK

SEQ ID NO: 280997 - protein, 15 aa, Artificial Sequence
  Description of Artificial Sequence: Synthetic peptide
  Seed: HIHIFSFTGEEMATK
HIHLFSVTYEEVATK

SEQ ID NO: 280998 - protein, 15 aa, Artificial Sequence
  Description of Artificial Sequence: Synthetic peptide
  Seed: HIHIFSFTGEEMATK
HIHLFSVTYEEYATK

SEQ ID NO: 280999 - protein, 15 aa, Artificial Sequence
  Description of Artificial Sequence: Synthetic peptide
  Seed: HIHIFSFTGEEMATK
HIHLFSWTFEEAATK

SEQ ID NO: 281000 - protein, 15 aa, Artificial Sequence
  Description of Artificial Sequence: Synthetic peptide
  Seed: HIHIFSFTGEEMATK
HIHLFSWTFEEFATK

SEQ ID NO: 281001 - protein, 15 aa, Artificial Sequence
  Description of Artificial Sequence: Synthetic peptide
  Seed: HIHIFSFTGEEMATK
HIHLFSWTFEEIATK

SEQ ID NO: 281002 - protein, 15 aa, Artificial Sequence
  Description of Artificial Sequence: Synthetic peptide
  Seed: HIHIFSFTGEEMATK
HIHLFSWTFEELATK

SEQ ID NO: 281003 - protein, 15 aa, Artificial Sequence
  Description of Artificial Sequence: Synthetic peptide
  Seed: HIHIFSFTGEEMATK
HIHLFSWTFEEMATK

SEQ ID NO: 281004 - protein, 15 aa, Artificial Sequence
  Description of Artificial Sequence: Synthetic peptide
  Seed: HIHIFSFTGEEMATK
HIHLFSWTFEETATK

SEQ ID NO: 281005 - protein, 15 aa, Artificial Sequence
  Description of Artificial Sequence: Synthetic peptide
  Seed: HIHIFSFTGEEMATK
HIHLFSWTFEEVATK

SEQ ID NO: 281006 - protein, 15 aa, Artificial Sequence
  Description of Artificial Sequence: Synthetic peptide
  Seed: HIHIFSFTGEEMATK
HIHLFSWTFEEYATK

SEQ ID NO: 281007 - protein, 15 aa, Artificial Sequence
  Description of Artificial Sequence: Synthetic peptide
  Seed: HIHIFSFTGEEMATK
HIHLFSWTIEELATK

SEQ ID NO: 281008 - protein, 15 aa, Artificial Sequence
  Description of Artificial Sequence: Synthetic peptide
  Seed: HIHIFSFTGEEMATK
HIHLFSWTLEEFATK

SEQ ID NO: 281009 - protein, 15 aa, Artificial Sequence
  Description of Artificial Sequence: Synthetic peptide
  Seed: HIHIFSFTGEEMATK
HIHLFSWTLEEIATK

SEQ ID NO: 281010 - protein, 15 aa, Artificial Sequence
  Description of Artificial Sequence: Synthetic peptide
  Seed: HIHIFSFTGEEMATK
HIHLFSWTLEELATK

SEQ ID NO: 281011 - protein, 15 aa, Artificial Sequence
  Description of Artificial Sequence: Synthetic peptide
  Seed: HIHIFSFTGEEMATK
HIHLFSWTLEEMATK

SEQ ID NO: 281012 - protein, 15 aa, Artificial Sequence
  Description of Artificial Sequence: Synthetic peptide
  Seed: HIHIFSFTGEEMATK
HIHLFSWTLEEVATK

SEQ ID NO: 281013 - protein, 15 aa, Artificial Sequence
  Description of Artificial Sequence: Synthetic peptide
  Seed: HIHIFSFTGEEMATK
HIHLFSWTMEEFATK

SEQ ID NO: 281014 - protein, 15 aa, Artificial Sequence
  Description of Artificial Sequence: Synthetic peptide
  Seed: HIHIFSFTGEEMATK
HIHLFSWTMEEIATK

SEQ ID NO: 281015 - protein, 15 aa, Artificial Sequence
  Description of Artificial Sequence: Synthetic peptide
  Seed: HIHIFSFTGEEMATK
HIHLFSWTMEELATK

SEQ ID NO: 281016 - protein, 15 aa, Artificial Sequence
  Description of Artificial Sequence: Synthetic peptide
  Seed: HIHIFSFTGEEMATK
HIHLFSWTWEELATK

SEQ ID NO: 281017 - protein, 15 aa, Artificial Sequence
  Description of Artificial Sequence: Synthetic peptide
  Seed: HIHIFSFTGEEMATK
HIHLFSWTYEEFATK

SEQ ID NO: 281018 - protein, 15 aa, Artificial Sequence
  Description of Artificial Sequence: Synthetic peptide
  Seed: HIHIFSFTGEEMATK
HIHLFSWTYEEIATK

SEQ ID NO: 281019 - protein, 15 aa, Artificial Sequence
  Description of Artificial Sequence: Synthetic peptide
  Seed: HIHIFSFTGEEMATK
HIHLFSWTYEELATK

SEQ ID NO: 281020 - protein, 15 aa, Artificial Sequence
  Description of Artificial Sequence: Synthetic peptide
  Seed: HIHIFSFTGEEMATK
HIHLFSWTYEEVATK

SEQ ID NO: 281021 - protein, 15 aa, Artificial Sequence
  Description of Artificial Sequence: Synthetic peptide
  Seed: HIHIFSFTGEEMATK
HIHLFSYTFEEAATK

SEQ ID NO: 281022 - protein, 15 aa, Artificial Sequence
  Description of Artificial Sequence: Synthetic peptide
  Seed: HIHIFSFTGEEMATK
HIHLFSYTFEEFATK

SEQ ID NO: 281023 - protein, 15 aa, Artificial Sequence
  Description of Artificial Sequence: Synthetic peptide
  Seed: HIHIFSFTGEEMATK
HIHLFSYTFEEIATK

SEQ ID NO: 281024 - protein, 15 aa, Artificial Sequence
  Description of Artificial Sequence: Synthetic peptide
  Seed: HIHIFSFTGEEMATK
HIHLFSYTFEELATK

SEQ ID NO: 281025 - protein, 15 aa, Artificial Sequence
  Description of Artificial Sequence: Synthetic peptide
  Seed: HIHIFSFTGEEMATK
HIHLFSYTFEEMATK

SEQ ID NO: 281026 - protein, 15 aa, Artificial Sequence
  Description of Artificial Sequence: Synthetic peptide
  Seed: HIHIFSFTGEEMATK
HIHLFSYTFEENATK

SEQ ID NO: 281027 - protein, 15 aa, Artificial Sequence
  Description of Artificial Sequence: Synthetic peptide
  Seed: HIHIFSFTGEEMATK
HIHLFSYTFEESATK

SEQ ID NO: 281028 - protein, 15 aa, Artificial Sequence
  Description of Artificial Sequence: Synthetic peptide
  Seed: HIHIFSFTGEEMATK
HIHLFSYTFEETATK

SEQ ID NO: 281029 - protein, 15 aa, Artificial Sequence
  Description of Artificial Sequence: Synthetic peptide
  Seed: HIHIFSFTGEEMATK
HIHLFSYTFEEVATK

SEQ ID NO: 281030 - protein, 15 aa, Artificial Sequence
  Description of Artificial Sequence: Synthetic peptide
  Seed: HIHIFSFTGEEMATK
HIHLFSYTFEEYATK

SEQ ID NO: 281031 - protein, 15 aa, Artificial Sequence
  Description of Artificial Sequence: Synthetic peptide
  Seed: HIHIFSFTGEEMATK
HIHLFSYTIEEFATK

SEQ ID NO: 281032 - protein, 15 aa, Artificial Sequence
  Description of Artificial Sequence: Synthetic peptide
  Seed: HIHIFSFTGEEMATK
HIHLFSYTIEEIATK

SEQ ID NO: 281033 - protein, 15 aa, Artificial Sequence
  Description of Artificial Sequence: Synthetic peptide
  Seed: HIHIFSFTGEEMATK
HIHLFSYTIEELATK

SEQ ID NO: 281034 - protein, 15 aa, Artificial Sequence
  Description of Artificial Sequence: Synthetic peptide
  Seed: HIHIFSFTGEEMATK
HIHLFSYTIEEVATK

SEQ ID NO: 281035 - protein, 15 aa, Artificial Sequence
  Description of Artificial Sequence: Synthetic peptide
  Seed: HIHIFSFTGEEMATK
HIHLFSYTLEEFATK

SEQ ID NO: 281036 - protein, 15 aa, Artificial Sequence
  Description of Artificial Sequence: Synthetic peptide
  Seed: HIHIFSFTGEEMATK
HIHLFSYTLEEIATK

SEQ ID NO: 281037 - protein, 15 aa, Artificial Sequence
  Description of Artificial Sequence: Synthetic peptide
  Seed: HIHIFSFTGEEMATK
HIHLFSYTLEELATK

SEQ ID NO: 281038 - protein, 15 aa, Artificial Sequence
  Description of Artificial Sequence: Synthetic peptide
  Seed: HIHIFSFTGEEMATK
HIHLFSYTLEEMATK

SEQ ID NO: 281039 - protein, 15 aa, Artificial Sequence
  Description of Artificial Sequence: Synthetic peptide
  Seed: HIHIFSFTGEEMATK
HIHLFSYTLEEVATK

SEQ ID NO: 281040 - protein, 15 aa, Artificial Sequence
  Description of Artificial Sequence: Synthetic peptide
  Seed: HIHIFSFTGEEMATK
HIHLFSYTLEEYATK

SEQ ID NO: 281041 - protein, 15 aa, Artificial Sequence
  Description of Artificial Sequence: Synthetic peptide
  Seed: HIHIFSFTGEEMATK
HIHLFSYTMEEIATK

SEQ ID NO: 281042 - protein, 15 aa, Artificial Sequence
  Description of Artificial Sequence: Synthetic peptide
  Seed: HIHIFSFTGEEMATK
HIHLFSYTMEELATK

SEQ ID NO: 281043 - protein, 15 aa, Artificial Sequence
  Description of Artificial Sequence: Synthetic peptide
  Seed: HIHIFSFTGEEMATK
HIHLFSYTMEEMATK

SEQ ID NO: 281044 - protein, 15 aa, Artificial Sequence
  Description of Artificial Sequence: Synthetic peptide
  Seed: HIHIFSFTGEEMATK
HIHLFSYTMEEVATK

SEQ ID NO: 281045 - protein, 15 aa, Artificial Sequence
  Description of Artificial Sequence: Synthetic peptide
  Seed: HIHIFSFTGEEMATK
HIHLFSYTWEEFATK

SEQ ID NO: 281046 - protein, 15 aa, Artificial Sequence
  Description of Artificial Sequence: Synthetic peptide
  Seed: HIHIFSFTGEEMATK
HIHLFSYTWEEIATK

SEQ ID NO: 281047 - protein, 15 aa, Artificial Sequence
  Description of Artificial Sequence: Synthetic peptide
  Seed: HIHIFSFTGEEMATK
HIHLFSYTWEELATK

SEQ ID NO: 281048 - protein, 15 aa, Artificial Sequence
  Description of Artificial Sequence: Synthetic peptide
  Seed: HIHIFSFTGEEMATK
HIHLFSYTWEEVATK

SEQ ID NO: 281049 - protein, 15 aa, Artificial Sequence
  Description of Artificial Sequence: Synthetic peptide
  Seed: HIHIFSFTGEEMATK
HIHLFSYTYEEFATK

SEQ ID NO: 281050 - protein, 15 aa, Artificial Sequence
  Description of Artificial Sequence: Synthetic peptide
  Seed: HIHIFSFTGEEMATK
HIHLFSYTYEEIATK

SEQ ID NO: 281051 - protein, 15 aa, Artificial Sequence
  Description of Artificial Sequence: Synthetic peptide
  Seed: HIHIFSFTGEEMATK
HIHLFSYTYEELATK

SEQ ID NO: 281052 - protein, 15 aa, Artificial Sequence
  Description of Artificial Sequence: Synthetic peptide
  Seed: HIHIFSFTGEEMATK
HIHLFSYTYEEVATK

SEQ ID NO: 281053 - protein, 15 aa, Artificial Sequence
  Description of Artificial Sequence: Synthetic peptide
  Seed: HIHIFSFTGEEMATK
HIHMFSATFEEAATK

SEQ ID NO: 281054 - protein, 15 aa, Artificial Sequence
  Description of Artificial Sequence: Synthetic peptide
  Seed: HIHIFSFTGEEMATK
HIHMFSATFEEFATK

SEQ ID NO: 281055 - protein, 15 aa, Artificial Sequence
  Description of Artificial Sequence: Synthetic peptide
  Seed: HIHIFSFTGEEMATK
HIHMFSATFEEIATK

SEQ ID NO: 281056 - protein, 15 aa, Artificial Sequence
  Description of Artificial Sequence: Synthetic peptide
  Seed: HIHIFSFTGEEMATK
HIHMFSATFEELATK

SEQ ID NO: 281057 - protein, 15 aa, Artificial Sequence
  Description of Artificial Sequence: Synthetic peptide
  Seed: HIHIFSFTGEEMATK
HIHMFSATFEEMATK

SEQ ID NO: 281058 - protein, 15 aa, Artificial Sequence
  Description of Artificial Sequence: Synthetic peptide
  Seed: HIHIFSFTGEEMATK
HIHMFSATFEETATK

SEQ ID NO: 281059 - protein, 15 aa, Artificial Sequence
  Description of Artificial Sequence: Synthetic peptide
  Seed: HIHIFSFTGEEMATK
HIHMFSATFEEVATK

SEQ ID NO: 281060 - protein, 15 aa, Artificial Sequence
  Description of Artificial Sequence: Synthetic peptide
  Seed: HIHIFSFTGEEMATK
HIHMFSATFEEYATK

SEQ ID NO: 281061 - protein, 15 aa, Artificial Sequence
  Description of Artificial Sequence: Synthetic peptide
  Seed: HIHIFSFTGEEMATK
HIHMFSATLEELATK

SEQ ID NO: 281062 - protein, 15 aa, Artificial Sequence
  Description of Artificial Sequence: Synthetic peptide
  Seed: HIHIFSFTGEEMATK
HIHMFSATYEEIATK

SEQ ID NO: 281063 - protein, 15 aa, Artificial Sequence
  Description of Artificial Sequence: Synthetic peptide
  Seed: HIHIFSFTGEEMATK
HIHMFSATYEELATK

SEQ ID NO: 281064 - protein, 15 aa, Artificial Sequence
  Description of Artificial Sequence: Synthetic peptide
  Seed: HIHIFSFTGEEMATK
HIHMFSATYEEVATK

SEQ ID NO: 281065 - protein, 15 aa, Artificial Sequence
  Description of Artificial Sequence: Synthetic peptide
  Seed: HIHIFSFTGEEMATK
HIHMFSCTFEEIATK

SEQ ID NO: 281066 - protein, 15 aa, Artificial Sequence
  Description of Artificial Sequence: Synthetic peptide
  Seed: HIHIFSFTGEEMATK
HIHMFSCTFEELATK

SEQ ID NO: 281067 - protein, 15 aa, Artificial Sequence
  Description of Artificial Sequence: Synthetic peptide
  Seed: HIHIFSFTGEEMATK
HIHMFSCTFEEVATK

SEQ ID NO: 281068 - protein, 15 aa, Artificial Sequence
  Description of Artificial Sequence: Synthetic peptide
  Seed: HIHIFSFTGEEMATK
HIHMFSDTFEEIATK

SEQ ID NO: 281069 - protein, 15 aa, Artificial Sequence
  Description of Artificial Sequence: Synthetic peptide
  Seed: HIHIFSFTGEEMATK
HIHMFSDTFEELATK

SEQ ID NO: 281070 - protein, 15 aa, Artificial Sequence
  Description of Artificial Sequence: Synthetic peptide
  Seed: HIHIFSFTGEEMATK
HIHMFSETFEEFATK

SEQ ID NO: 281071 - protein, 15 aa, Artificial Sequence
  Description of Artificial Sequence: Synthetic peptide
  Seed: HIHIFSFTGEEMATK
HIHMFSETFEEIATK

SEQ ID NO: 281072 - protein, 15 aa, Artificial Sequence
  Description of Artificial Sequence: Synthetic peptide
  Seed: HIHIFSFTGEEMATK
HIHMFSETFEELATK

SEQ ID NO: 281073 - protein, 15 aa, Artificial Sequence
  Description of Artificial Sequence: Synthetic peptide
  Seed: HIHIFSFTGEEMATK
HIHMFSETFEEMATK

SEQ ID NO: 281074 - protein, 15 aa, Artificial Sequence
  Description of Artificial Sequence: Synthetic peptide
  Seed: HIHIFSFTGEEMATK
HIHMFSETFEEVATK

SEQ ID NO: 281075 - protein, 15 aa, Artificial Sequence
  Description of Artificial Sequence: Synthetic peptide
  Seed: HIHIFSFTGEEMATK
HIHMFSFTFEEAATK

SEQ ID NO: 281076 - protein, 15 aa, Artificial Sequence
  Description of Artificial Sequence: Synthetic peptide
  Seed: HIHIFSFTGEEMATK
HIHMFSFTFEEEATK

SEQ ID NO: 281077 - protein, 15 aa, Artificial Sequence
  Description of Artificial Sequence: Synthetic peptide
  Seed: HIHIFSFTGEEMATK
HIHMFSFTFEEFATK

SEQ ID NO: 281078 - protein, 15 aa, Artificial Sequence
  Description of Artificial Sequence: Synthetic peptide
  Seed: HIHIFSFTGEEMATK
HIHMFSFTFEEHATK

SEQ ID NO: 281079 - protein, 15 aa, Artificial Sequence
  Description of Artificial Sequence: Synthetic peptide
  Seed: HIHIFSFTGEEMATK
HIHMFSFTFEEIATK

SEQ ID NO: 281080 - protein, 15 aa, Artificial Sequence
  Description of Artificial Sequence: Synthetic peptide
  Seed: HIHIFSFTGEEMATK
HIHMFSFTFEELATK

SEQ ID NO: 281081 - protein, 15 aa, Artificial Sequence
  Description of Artificial Sequence: Synthetic peptide
  Seed: HIHIFSFTGEEMATK
HIHMFSFTFEEMATK

SEQ ID NO: 281082 - protein, 15 aa, Artificial Sequence
  Description of Artificial Sequence: Synthetic peptide
  Seed: HIHIFSFTGEEMATK
HIHMFSFTFEENATK

SEQ ID NO: 281083 - protein, 15 aa, Artificial Sequence
  Description of Artificial Sequence: Synthetic peptide
  Seed: HIHIFSFTGEEMATK
HIHMFSFTFEEPATK

SEQ ID NO: 281084 - protein, 15 aa, Artificial Sequence
  Description of Artificial Sequence: Synthetic peptide
  Seed: HIHIFSFTGEEMATK
HIHMFSFTFEERATK

SEQ ID NO: 281085 - protein, 15 aa, Artificial Sequence
  Description of Artificial Sequence: Synthetic peptide
  Seed: HIHIFSFTGEEMATK
HIHMFSFTFEESATK

SEQ ID NO: 281086 - protein, 15 aa, Artificial Sequence
  Description of Artificial Sequence: Synthetic peptide
  Seed: HIHIFSFTGEEMATK
HIHMFSFTFEETATK

SEQ ID NO: 281087 - protein, 15 aa, Artificial Sequence
  Description of Artificial Sequence: Synthetic peptide
  Seed: HIHIFSFTGEEMATK
HIHMFSFTFEEVATK

SEQ ID NO: 281088 - protein, 15 aa, Artificial Sequence
  Description of Artificial Sequence: Synthetic peptide
  Seed: HIHIFSFTGEEMATK
HIHMFSFTFEEYATK

SEQ ID NO: 281089 - protein, 15 aa, Artificial Sequence
  Description of Artificial Sequence: Synthetic peptide
  Seed: HIHIFSFTGEEMATK
HIHMFSFTIEEFATK

SEQ ID NO: 281090 - protein, 15 aa, Artificial Sequence
  Description of Artificial Sequence: Synthetic peptide
  Seed: HIHIFSFTGEEMATK
HIHMFSFTIEEIATK

SEQ ID NO: 281091 - protein, 15 aa, Artificial Sequence
  Description of Artificial Sequence: Synthetic peptide
  Seed: HIHIFSFTGEEMATK
HIHMFSFTIEELATK

SEQ ID NO: 281092 - protein, 15 aa, Artificial Sequence
  Description of Artificial Sequence: Synthetic peptide
  Seed: HIHIFSFTGEEMATK
HIHMFSFTIEEMATK

SEQ ID NO: 281093 - protein, 15 aa, Artificial Sequence
  Description of Artificial Sequence: Synthetic peptide
  Seed: HIHIFSFTGEEMATK
HIHMFSFTIEEVATK

SEQ ID NO: 281094 - protein, 15 aa, Artificial Sequence
  Description of Artificial Sequence: Synthetic peptide
  Seed: HIHIFSFTGEEMATK
HIHMFSFTLEEFATK

SEQ ID NO: 281095 - protein, 15 aa, Artificial Sequence
  Description of Artificial Sequence: Synthetic peptide
  Seed: HIHIFSFTGEEMATK
HIHMFSFTLEEIATK

SEQ ID NO: 281096 - protein, 15 aa, Artificial Sequence
  Description of Artificial Sequence: Synthetic peptide
  Seed: HIHIFSFTGEEMATK
HIHMFSFTLEELATK

SEQ ID NO: 281097 - protein, 15 aa, Artificial Sequence
  Description of Artificial Sequence: Synthetic peptide
  Seed: HIHIFSFTGEEMATK
HIHMFSFTLEEMATK

SEQ ID NO: 281098 - protein, 15 aa, Artificial Sequence
  Description of Artificial Sequence: Synthetic peptide
  Seed: HIHIFSFTGEEMATK
HIHMFSFTLEETATK

SEQ ID NO: 281099 - protein, 15 aa, Artificial Sequence
  Description of Artificial Sequence: Synthetic peptide
  Seed: HIHIFSFTGEEMATK
HIHMFSFTLEEVATK

SEQ ID NO: 281100 - protein, 15 aa, Artificial Sequence
  Description of Artificial Sequence: Synthetic peptide
  Seed: HIHIFSFTGEEMATK
HIHMFSFTLEEYATK

SEQ ID NO: 281101 - protein, 15 aa, Artificial Sequence
  Description of Artificial Sequence: Synthetic peptide
  Seed: HIHIFSFTGEEMATK
HIHMFSFTMEEFATK

SEQ ID NO: 281102 - protein, 15 aa, Artificial Sequence
  Description of Artificial Sequence: Synthetic peptide
  Seed: HIHIFSFTGEEMATK
HIHMFSFTMEEIATK

SEQ ID NO: 281103 - protein, 15 aa, Artificial Sequence
  Description of Artificial Sequence: Synthetic peptide
  Seed: HIHIFSFTGEEMATK
HIHMFSFTMEELATK

SEQ ID NO: 281104 - protein, 15 aa, Artificial Sequence
  Description of Artificial Sequence: Synthetic peptide
  Seed: HIHIFSFTGEEMATK
HIHMFSFTMEEMATK

SEQ ID NO: 281105 - protein, 15 aa, Artificial Sequence
  Description of Artificial Sequence: Synthetic peptide
  Seed: HIHIFSFTGEEMATK
HIHMFSFTMEEVATK

SEQ ID NO: 281106 - protein, 15 aa, Artificial Sequence
  Description of Artificial Sequence: Synthetic peptide
  Seed: HIHIFSFTGEEMATK
HIHMFSFTVEEFATK

SEQ ID NO: 281107 - protein, 15 aa, Artificial Sequence
  Description of Artificial Sequence: Synthetic peptide
  Seed: HIHIFSFTGEEMATK
HIHMFSFTVEELATK

SEQ ID NO: 281108 - protein, 15 aa, Artificial Sequence
  Description of Artificial Sequence: Synthetic peptide
  Seed: HIHIFSFTGEEMATK
HIHMFSFTWEEFATK

SEQ ID NO: 281109 - protein, 15 aa, Artificial Sequence
  Description of Artificial Sequence: Synthetic peptide
  Seed: HIHIFSFTGEEMATK
HIHMFSFTWEEIATK

SEQ ID NO: 281110 - protein, 15 aa, Artificial Sequence
  Description of Artificial Sequence: Synthetic peptide
  Seed: HIHIFSFTGEEMATK
HIHMFSFTWEELATK

SEQ ID NO: 281111 - protein, 15 aa, Artificial Sequence
  Description of Artificial Sequence: Synthetic peptide
  Seed: HIHIFSFTGEEMATK
HIHMFSFTWEEMATK

SEQ ID NO: 281112 - protein, 15 aa, Artificial Sequence
  Description of Artificial Sequence: Synthetic peptide
  Seed: HIHIFSFTGEEMATK
HIHMFSFTWEEVATK

SEQ ID NO: 281113 - protein, 15 aa, Artificial Sequence
  Description of Artificial Sequence: Synthetic peptide
  Seed: HIHIFSFTGEEMATK
HIHMFSFTYEEFATK

SEQ ID NO: 281114 - protein, 15 aa, Artificial Sequence
  Description of Artificial Sequence: Synthetic peptide
  Seed: HIHIFSFTGEEMATK
HIHMFSFTYEEIATK

SEQ ID NO: 281115 - protein, 15 aa, Artificial Sequence
  Description of Artificial Sequence: Synthetic peptide
  Seed: HIHIFSFTGEEMATK
HIHMFSFTYEELATK

SEQ ID NO: 281116 - protein, 15 aa, Artificial Sequence
  Description of Artificial Sequence: Synthetic peptide
  Seed: HIHIFSFTGEEMATK
HIHMFSFTYEEMATK

SEQ ID NO: 281117 - protein, 15 aa, Artificial Sequence
  Description of Artificial Sequence: Synthetic peptide
  Seed: HIHIFSFTGEEMATK
HIHMFSFTYEEVATK

SEQ ID NO: 281118 - protein, 15 aa, Artificial Sequence
  Description of Artificial Sequence: Synthetic peptide
  Seed: HIHIFSFTGEEMATK
HIHMFSFTYEEYATK

SEQ ID NO: 281119 - protein, 15 aa, Artificial Sequence
  Description of Artificial Sequence: Synthetic peptide
  Seed: HIHIFSFTGEEMATK
HIHMFSHTFEEAATK

SEQ ID NO: 281120 - protein, 15 aa, Artificial Sequence
  Description of Artificial Sequence: Synthetic peptide
  Seed: HIHIFSFTGEEMATK
HIHMFSHTFEEFATK

SEQ ID NO: 281121 - protein, 15 aa, Artificial Sequence
  Description of Artificial Sequence: Synthetic peptide
  Seed: HIHIFSFTGEEMATK
HIHMFSHTFEEIATK

SEQ ID NO: 281122 - protein, 15 aa, Artificial Sequence
  Description of Artificial Sequence: Synthetic peptide
  Seed: HIHIFSFTGEEMATK
HIHMFSHTFEELATK

SEQ ID NO: 281123 - protein, 15 aa, Artificial Sequence
  Description of Artificial Sequence: Synthetic peptide
  Seed: HIHIFSFTGEEMATK
HIHMFSHTFEEMATK

SEQ ID NO: 281124 - protein, 15 aa, Artificial Sequence
  Description of Artificial Sequence: Synthetic peptide
  Seed: HIHIFSFTGEEMATK
HIHMFSHTFEESATK

SEQ ID NO: 281125 - protein, 15 aa, Artificial Sequence
  Description of Artificial Sequence: Synthetic peptide
  Seed: HIHIFSFTGEEMATK
HIHMFSHTFEETATK

SEQ ID NO: 281126 - protein, 15 aa, Artificial Sequence
  Description of Artificial Sequence: Synthetic peptide
  Seed: HIHIFSFTGEEMATK
HIHMFSHTFEEVATK

SEQ ID NO: 281127 - protein, 15 aa, Artificial Sequence
  Description of Artificial Sequence: Synthetic peptide
  Seed: HIHIFSFTGEEMATK
HIHMFSHTFEEYATK

SEQ ID NO: 281128 - protein, 15 aa, Artificial Sequence
  Description of Artificial Sequence: Synthetic peptide
  Seed: HIHIFSFTGEEMATK
HIHMFSHTLEEIATK

SEQ ID NO: 281129 - protein, 15 aa, Artificial Sequence
  Description of Artificial Sequence: Synthetic peptide
  Seed: HIHIFSFTGEEMATK
HIHMFSHTLEELATK

SEQ ID NO: 281130 - protein, 15 aa, Artificial Sequence
  Description of Artificial Sequence: Synthetic peptide
  Seed: HIHIFSFTGEEMATK
HIHMFSHTYEELATK

SEQ ID NO: 281131 - protein, 15 aa, Artificial Sequence
  Description of Artificial Sequence: Synthetic peptide
  Seed: HIHIFSFTGEEMATK
HIHMFSITAEEAATK

SEQ ID NO: 281132 - protein, 15 aa, Artificial Sequence
  Description of Artificial Sequence: Synthetic peptide
  Seed: HIHIFSFTGEEMATK
HIHMFSITAEELATK

SEQ ID NO: 281133 - protein, 15 aa, Artificial Sequence
  Description of Artificial Sequence: Synthetic peptide
  Seed: HIHIFSFTGEEMATK
HIHMFSITAEESATK

SEQ ID NO: 281134 - protein, 15 aa, Artificial Sequence
  Description of Artificial Sequence: Synthetic peptide
  Seed: HIHIFSFTGEEMATK
HIHMFSITAEEVATK

SEQ ID NO: 281135 - protein, 15 aa, Artificial Sequence
  Description of Artificial Sequence: Synthetic peptide
  Seed: HIHIFSFTGEEMATK
HIHMFSITFEEAATK

SEQ ID NO: 281136 - protein, 15 aa, Artificial Sequence
  Description of Artificial Sequence: Synthetic peptide
  Seed: HIHIFSFTGEEMATK
HIHMFSITFEEDATK

SEQ ID NO: 281137 - protein, 15 aa, Artificial Sequence
  Description of Artificial Sequence: Synthetic peptide
  Seed: HIHIFSFTGEEMATK
HIHMFSITFEEEATK

SEQ ID NO: 281138 - protein, 15 aa, Artificial Sequence
  Description of Artificial Sequence: Synthetic peptide
  Seed: HIHIFSFTGEEMATK
HIHMFSITFEEFATK

SEQ ID NO: 281139 - protein, 15 aa, Artificial Sequence
  Description of Artificial Sequence: Synthetic peptide
  Seed: HIHIFSFTGEEMATK
HIHMFSITFEEHATK

SEQ ID NO: 281140 - protein, 15 aa, Artificial Sequence
  Description of Artificial Sequence: Synthetic peptide
  Seed: HIHIFSFTGEEMATK
HIHMFSITFEEIATK

SEQ ID NO: 281141 - protein, 15 aa, Artificial Sequence
  Description of Artificial Sequence: Synthetic peptide
  Seed: HIHIFSFTGEEMATK
HIHMFSITFEELATK

SEQ ID NO: 281142 - protein, 15 aa, Artificial Sequence
  Description of Artificial Sequence: Synthetic peptide
  Seed: HIHIFSFTGEEMATK
HIHMFSITFEEMATK

SEQ ID NO: 281143 - protein, 15 aa, Artificial Sequence
  Description of Artificial Sequence: Synthetic peptide
  Seed: HIHIFSFTGEEMATK
HIHMFSITFEENATK

SEQ ID NO: 281144 - protein, 15 aa, Artificial Sequence
  Description of Artificial Sequence: Synthetic peptide
  Seed: HIHIFSFTGEEMATK
HIHMFSITFEERATK

SEQ ID NO: 281145 - protein, 15 aa, Artificial Sequence
  Description of Artificial Sequence: Synthetic peptide
  Seed: HIHIFSFTGEEMATK
HIHMFSITFEESATK

SEQ ID NO: 281146 - protein, 15 aa, Artificial Sequence
  Description of Artificial Sequence: Synthetic peptide
  Seed: HIHIFSFTGEEMATK
HIHMFSITFEETATK

SEQ ID NO: 281147 - protein, 15 aa, Artificial Sequence
  Description of Artificial Sequence: Synthetic peptide
  Seed: HIHIFSFTGEEMATK
HIHMFSITFEEVATK

SEQ ID NO: 281148 - protein, 15 aa, Artificial Sequence
  Description of Artificial Sequence: Synthetic peptide
  Seed: HIHIFSFTGEEMATK
HIHMFSITFEEYATK

SEQ ID NO: 281149 - protein, 15 aa, Artificial Sequence
  Description of Artificial Sequence: Synthetic peptide
  Seed: HIHIFSFTGEEMATK
HIHMFSITGEELATK

SEQ ID NO: 281150 - protein, 15 aa, Artificial Sequence
  Description of Artificial Sequence: Synthetic peptide
  Seed: HIHIFSFTGEEMATK
HIHMFSITIEEIATK

SEQ ID NO: 281151 - protein, 15 aa, Artificial Sequence
  Description of Artificial Sequence: Synthetic peptide
  Seed: HIHIFSFTGEEMATK
HIHMFSITIEELATK

SEQ ID NO: 281152 - protein, 15 aa, Artificial Sequence
  Description of Artificial Sequence: Synthetic peptide
  Seed: HIHIFSFTGEEMATK
HIHMFSITLEEFATK

SEQ ID NO: 281153 - protein, 15 aa, Artificial Sequence
  Description of Artificial Sequence: Synthetic peptide
  Seed: HIHIFSFTGEEMATK
HIHMFSITLEEIATK

SEQ ID NO: 281154 - protein, 15 aa, Artificial Sequence
  Description of Artificial Sequence: Synthetic peptide
  Seed: HIHIFSFTGEEMATK
HIHMFSITLEELATK

SEQ ID NO: 281155 - protein, 15 aa, Artificial Sequence
  Description of Artificial Sequence: Synthetic peptide
  Seed: HIHIFSFTGEEMATK
HIHMFSITLEEMATK

SEQ ID NO: 281156 - protein, 15 aa, Artificial Sequence
  Description of Artificial Sequence: Synthetic peptide
  Seed: HIHIFSFTGEEMATK
HIHMFSITLEEVATK

SEQ ID NO: 281157 - protein, 15 aa, Artificial Sequence
  Description of Artificial Sequence: Synthetic peptide
  Seed: HIHIFSFTGEEMATK
HIHMFSITMEELATK

SEQ ID NO: 281158 - protein, 15 aa, Artificial Sequence
  Description of Artificial Sequence: Synthetic peptide
  Seed: HIHIFSFTGEEMATK
HIHMFSITWEEFATK

SEQ ID NO: 281159 - protein, 15 aa, Artificial Sequence
  Description of Artificial Sequence: Synthetic peptide
  Seed: HIHIFSFTGEEMATK
HIHMFSITWEEIATK

SEQ ID NO: 281160 - protein, 15 aa, Artificial Sequence
  Description of Artificial Sequence: Synthetic peptide
  Seed: HIHIFSFTGEEMATK
HIHMFSITWEELATK

SEQ ID NO: 281161 - protein, 15 aa, Artificial Sequence
  Description of Artificial Sequence: Synthetic peptide
  Seed: HIHIFSFTGEEMATK
HIHMFSITWEEMATK

SEQ ID NO: 281162 - protein, 15 aa, Artificial Sequence
  Description of Artificial Sequence: Synthetic peptide
  Seed: HIHIFSFTGEEMATK
HIHMFSITWEEVATK

SEQ ID NO: 281163 - protein, 15 aa, Artificial Sequence
  Description of Artificial Sequence: Synthetic peptide
  Seed: HIHIFSFTGEEMATK
HIHMFSITYEEFATK

SEQ ID NO: 281164 - protein, 15 aa, Artificial Sequence
  Description of Artificial Sequence: Synthetic peptide
  Seed: HIHIFSFTGEEMATK
HIHMFSITYEEIATK

SEQ ID NO: 281165 - protein, 15 aa, Artificial Sequence
  Description of Artificial Sequence: Synthetic peptide
  Seed: HIHIFSFTGEEMATK
HIHMFSITYEELATK

SEQ ID NO: 281166 - protein, 15 aa, Artificial Sequence
  Description of Artificial Sequence: Synthetic peptide
  Seed: HIHIFSFTGEEMATK
HIHMFSITYEEMATK

SEQ ID NO: 281167 - protein, 15 aa, Artificial Sequence
  Description of Artificial Sequence: Synthetic peptide
  Seed: HIHIFSFTGEEMATK
HIHMFSITYEEVATK

SEQ ID NO: 281168 - protein, 15 aa, Artificial Sequence
  Description of Artificial Sequence: Synthetic peptide
  Seed: HIHIFSFTGEEMATK
HIHMFSITYEEYATK

SEQ ID NO: 281169 - protein, 15 aa, Artificial Sequence
  Description of Artificial Sequence: Synthetic peptide
  Seed: HIHIFSFTGEEMATK
HIHMFSKTFEEFATK

SEQ ID NO: 281170 - protein, 15 aa, Artificial Sequence
  Description of Artificial Sequence: Synthetic peptide
  Seed: HIHIFSFTGEEMATK
HIHMFSKTFEEIATK

SEQ ID NO: 281171 - protein, 15 aa, Artificial Sequence
  Description of Artificial Sequence: Synthetic peptide
  Seed: HIHIFSFTGEEMATK
HIHMFSKTFEELATK

SEQ ID NO: 281172 - protein, 15 aa, Artificial Sequence
  Description of Artificial Sequence: Synthetic peptide
  Seed: HIHIFSFTGEEMATK
HIHMFSKTFEEMATK

SEQ ID NO: 281173 - protein, 15 aa, Artificial Sequence
  Description of Artificial Sequence: Synthetic peptide
  Seed: HIHIFSFTGEEMATK
HIHMFSKTFEEVATK

SEQ ID NO: 281174 - protein, 15 aa, Artificial Sequence
  Description of Artificial Sequence: Synthetic peptide
  Seed: HIHIFSFTGEEMATK
HIHMFSLTAEEAATK

SEQ ID NO: 281175 - protein, 15 aa, Artificial Sequence
  Description of Artificial Sequence: Synthetic peptide
  Seed: HIHIFSFTGEEMATK
HIHMFSLTAEEIATK

SEQ ID NO: 281176 - protein, 15 aa, Artificial Sequence
  Description of Artificial Sequence: Synthetic peptide
  Seed: HIHIFSFTGEEMATK
HIHMFSLTAEELATK

SEQ ID NO: 281177 - protein, 15 aa, Artificial Sequence
  Description of Artificial Sequence: Synthetic peptide
  Seed: HIHIFSFTGEEMATK
HIHMFSLTAEEMATK

SEQ ID NO: 281178 - protein, 15 aa, Artificial Sequence
  Description of Artificial Sequence: Synthetic peptide
  Seed: HIHIFSFTGEEMATK
HIHMFSLTAEENATK

SEQ ID NO: 281179 - protein, 15 aa, Artificial Sequence
  Description of Artificial Sequence: Synthetic peptide
  Seed: HIHIFSFTGEEMATK
HIHMFSLTAEESATK

SEQ ID NO: 281180 - protein, 15 aa, Artificial Sequence
  Description of Artificial Sequence: Synthetic peptide
  Seed: HIHIFSFTGEEMATK
HIHMFSLTAEETATK

SEQ ID NO: 281181 - protein, 15 aa, Artificial Sequence
  Description of Artificial Sequence: Synthetic peptide
  Seed: HIHIFSFTGEEMATK
HIHMFSLTAEEVATK

SEQ ID NO: 281182 - protein, 15 aa, Artificial Sequence
  Description of Artificial Sequence: Synthetic peptide
  Seed: HIHIFSFTGEEMATK
HIHMFSLTFEEAATK

SEQ ID NO: 281183 - protein, 15 aa, Artificial Sequence
  Description of Artificial Sequence: Synthetic peptide
  Seed: HIHIFSFTGEEMATK
HIHMFSLTFEEEATK

SEQ ID NO: 281184 - protein, 15 aa, Artificial Sequence
  Description of Artificial Sequence: Synthetic peptide
  Seed: HIHIFSFTGEEMATK
HIHMFSLTFEEFATK

SEQ ID NO: 281185 - protein, 15 aa, Artificial Sequence
  Description of Artificial Sequence: Synthetic peptide
  Seed: HIHIFSFTGEEMATK
HIHMFSLTFEEHATK

SEQ ID NO: 281186 - protein, 15 aa, Artificial Sequence
  Description of Artificial Sequence: Synthetic peptide
  Seed: HIHIFSFTGEEMATK
HIHMFSLTFEEIATK

SEQ ID NO: 281187 - protein, 15 aa, Artificial Sequence
  Description of Artificial Sequence: Synthetic peptide
  Seed: HIHIFSFTGEEMATK
HIHMFSLTFEELATK

SEQ ID NO: 281188 - protein, 15 aa, Artificial Sequence
  Description of Artificial Sequence: Synthetic peptide
  Seed: HIHIFSFTGEEMATK
HIHMFSLTFEEMATK

SEQ ID NO: 281189 - protein, 15 aa, Artificial Sequence
  Description of Artificial Sequence: Synthetic peptide
  Seed: HIHIFSFTGEEMATK
HIHMFSLTFEENATK

SEQ ID NO: 281190 - protein, 15 aa, Artificial Sequence
  Description of Artificial Sequence: Synthetic peptide
  Seed: HIHIFSFTGEEMATK
HIHMFSLTFEERATK

SEQ ID NO: 281191 - protein, 15 aa, Artificial Sequence
  Description of Artificial Sequence: Synthetic peptide
  Seed: HIHIFSFTGEEMATK
HIHMFSLTFEESATK

SEQ ID NO: 281192 - protein, 15 aa, Artificial Sequence
  Description of Artificial Sequence: Synthetic peptide
  Seed: HIHIFSFTGEEMATK
HIHMFSLTFEETATK

SEQ ID NO: 281193 - protein, 15 aa, Artificial Sequence
  Description of Artificial Sequence: Synthetic peptide
  Seed: HIHIFSFTGEEMATK
HIHMFSLTFEEVATK

SEQ ID NO: 281194 - protein, 15 aa, Artificial Sequence
  Description of Artificial Sequence: Synthetic peptide
  Seed: HIHIFSFTGEEMATK
HIHMFSLTFEEYATK

SEQ ID NO: 281195 - protein, 15 aa, Artificial Sequence
  Description of Artificial Sequence: Synthetic peptide
  Seed: HIHIFSFTGEEMATK
HIHMFSLTGEEAATK

SEQ ID NO: 281196 - protein, 15 aa, Artificial Sequence
  Description of Artificial Sequence: Synthetic peptide
  Seed: HIHIFSFTGEEMATK
HIHMFSLTGEEIATK

SEQ ID NO: 281197 - protein, 15 aa, Artificial Sequence
  Description of Artificial Sequence: Synthetic peptide
  Seed: HIHIFSFTGEEMATK
HIHMFSLTGEELATK

SEQ ID NO: 281198 - protein, 15 aa, Artificial Sequence
  Description of Artificial Sequence: Synthetic peptide
  Seed: HIHIFSFTGEEMATK
HIHMFSLTGEEMATK

SEQ ID NO: 281199 - protein, 15 aa, Artificial Sequence
  Description of Artificial Sequence: Synthetic peptide
  Seed: HIHIFSFTGEEMATK
HIHMFSLTGEETATK

SEQ ID NO: 281200 - protein, 15 aa, Artificial Sequence
  Description of Artificial Sequence: Synthetic peptide
  Seed: HIHIFSFTGEEMATK
HIHMFSLTGEEVATK

SEQ ID NO: 281201 - protein, 15 aa, Artificial Sequence
  Description of Artificial Sequence: Synthetic peptide
  Seed: HIHIFSFTGEEMATK
HIHMFSLTIEEAATK

SEQ ID NO: 281202 - protein, 15 aa, Artificial Sequence
  Description of Artificial Sequence: Synthetic peptide
  Seed: HIHIFSFTGEEMATK
HIHMFSLTIEELATK

SEQ ID NO: 281203 - protein, 15 aa, Artificial Sequence
  Description of Artificial Sequence: Synthetic peptide
  Seed: HIHIFSFTGEEMATK
HIHMFSLTIEENATK

SEQ ID NO: 281204 - protein, 15 aa, Artificial Sequence
  Description of Artificial Sequence: Synthetic peptide
  Seed: HIHIFSFTGEEMATK
HIHMFSLTIEESATK

SEQ ID NO: 281205 - protein, 15 aa, Artificial Sequence
  Description of Artificial Sequence: Synthetic peptide
  Seed: HIHIFSFTGEEMATK
HIHMFSLTLEEFATK

SEQ ID NO: 281206 - protein, 15 aa, Artificial Sequence
  Description of Artificial Sequence: Synthetic peptide
  Seed: HIHIFSFTGEEMATK
HIHMFSLTLEEIATK

SEQ ID NO: 281207 - protein, 15 aa, Artificial Sequence
  Description of Artificial Sequence: Synthetic peptide
  Seed: HIHIFSFTGEEMATK
HIHMFSLTLEELATK

SEQ ID NO: 281208 - protein, 15 aa, Artificial Sequence
  Description of Artificial Sequence: Synthetic peptide
  Seed: HIHIFSFTGEEMATK
HIHMFSLTLEEMATK

SEQ ID NO: 281209 - protein, 15 aa, Artificial Sequence
  Description of Artificial Sequence: Synthetic peptide
  Seed: HIHIFSFTGEEMATK
HIHMFSLTLEEVATK

SEQ ID NO: 281210 - protein, 15 aa, Artificial Sequence
  Description of Artificial Sequence: Synthetic peptide
  Seed: HIHIFSFTGEEMATK
HIHMFSLTMEEFATK

SEQ ID NO: 281211 - protein, 15 aa, Artificial Sequence
  Description of Artificial Sequence: Synthetic peptide
  Seed: HIHIFSFTGEEMATK
HIHMFSLTMEELATK

SEQ ID NO: 281212 - protein, 15 aa, Artificial Sequence
  Description of Artificial Sequence: Synthetic peptide
  Seed: HIHIFSFTGEEMATK
HIHMFSLTPEEAATK

SEQ ID NO: 281213 - protein, 15 aa, Artificial Sequence
  Description of Artificial Sequence: Synthetic peptide
  Seed: HIHIFSFTGEEMATK
HIHMFSLTPEELATK

SEQ ID NO: 281214 - protein, 15 aa, Artificial Sequence
  Description of Artificial Sequence: Synthetic peptide
  Seed: HIHIFSFTGEEMATK
HIHMFSLTPEESATK

SEQ ID NO: 281215 - protein, 15 aa, Artificial Sequence
  Description of Artificial Sequence: Synthetic peptide
  Seed: HIHIFSFTGEEMATK
HIHMFSLTSEEAATK

SEQ ID NO: 281216 - protein, 15 aa, Artificial Sequence
  Description of Artificial Sequence: Synthetic peptide
  Seed: HIHIFSFTGEEMATK
HIHMFSLTSEEIATK

SEQ ID NO: 281217 - protein, 15 aa, Artificial Sequence
  Description of Artificial Sequence: Synthetic peptide
  Seed: HIHIFSFTGEEMATK
HIHMFSLTSEELATK

SEQ ID NO: 281218 - protein, 15 aa, Artificial Sequence
  Description of Artificial Sequence: Synthetic peptide
  Seed: HIHIFSFTGEEMATK
HIHMFSLTSEENATK

SEQ ID NO: 281219 - protein, 15 aa, Artificial Sequence
  Description of Artificial Sequence: Synthetic peptide
  Seed: HIHIFSFTGEEMATK
HIHMFSLTSEESATK

SEQ ID NO: 281220 - protein, 15 aa, Artificial Sequence
  Description of Artificial Sequence: Synthetic peptide
  Seed: HIHIFSFTGEEMATK
HIHMFSLTSEETATK

SEQ ID NO: 281221 - protein, 15 aa, Artificial Sequence
  Description of Artificial Sequence: Synthetic peptide
  Seed: HIHIFSFTGEEMATK
HIHMFSLTSEEVATK

SEQ ID NO: 281222 - protein, 15 aa, Artificial Sequence
  Description of Artificial Sequence: Synthetic peptide
  Seed: HIHIFSFTGEEMATK
HIHMFSLTTEEAATK

SEQ ID NO: 281223 - protein, 15 aa, Artificial Sequence
  Description of Artificial Sequence: Synthetic peptide
  Seed: HIHIFSFTGEEMATK
HIHMFSLTTEESATK

SEQ ID NO: 281224 - protein, 15 aa, Artificial Sequence
  Description of Artificial Sequence: Synthetic peptide
  Seed: HIHIFSFTGEEMATK
HIHMFSLTVEEAATK

SEQ ID NO: 281225 - protein, 15 aa, Artificial Sequence
  Description of Artificial Sequence: Synthetic peptide
  Seed: HIHIFSFTGEEMATK
HIHMFSLTVEEMATK

SEQ ID NO: 281226 - protein, 15 aa, Artificial Sequence
  Description of Artificial Sequence: Synthetic peptide
  Seed: HIHIFSFTGEEMATK
HIHMFSLTVEENATK

SEQ ID NO: 281227 - protein, 15 aa, Artificial Sequence
  Description of Artificial Sequence: Synthetic peptide
  Seed: HIHIFSFTGEEMATK
HIHMFSLTVEESATK

SEQ ID NO: 281228 - protein, 15 aa, Artificial Sequence
  Description of Artificial Sequence: Synthetic peptide
  Seed: HIHIFSFTGEEMATK
HIHMFSLTVEETATK

SEQ ID NO: 281229 - protein, 15 aa, Artificial Sequence
  Description of Artificial Sequence: Synthetic peptide
  Seed: HIHIFSFTGEEMATK
HIHMFSLTWEEFATK

SEQ ID NO: 281230 - protein, 15 aa, Artificial Sequence
  Description of Artificial Sequence: Synthetic peptide
  Seed: HIHIFSFTGEEMATK
HIHMFSLTWEEIATK

SEQ ID NO: 281231 - protein, 15 aa, Artificial Sequence
  Description of Artificial Sequence: Synthetic peptide
  Seed: HIHIFSFTGEEMATK
HIHMFSLTWEELATK

SEQ ID NO: 281232 - protein, 15 aa, Artificial Sequence
  Description of Artificial Sequence: Synthetic peptide
  Seed: HIHIFSFTGEEMATK
HIHMFSLTWEEVATK

SEQ ID NO: 281233 - protein, 15 aa, Artificial Sequence
  Description of Artificial Sequence: Synthetic peptide
  Seed: HIHIFSFTGEEMATK
HIHMFSLTYEEFATK

SEQ ID NO: 281234 - protein, 15 aa, Artificial Sequence
  Description of Artificial Sequence: Synthetic peptide
  Seed: HIHIFSFTGEEMATK
HIHMFSLTYEEIATK

SEQ ID NO: 281235 - protein, 15 aa, Artificial Sequence
  Description of Artificial Sequence: Synthetic peptide
  Seed: HIHIFSFTGEEMATK
HIHMFSLTYEELATK

SEQ ID NO: 281236 - protein, 15 aa, Artificial Sequence
  Description of Artificial Sequence: Synthetic peptide
  Seed: HIHIFSFTGEEMATK
HIHMFSLTYEEMATK

SEQ ID NO: 281237 - protein, 15 aa, Artificial Sequence
  Description of Artificial Sequence: Synthetic peptide
  Seed: HIHIFSFTGEEMATK
HIHMFSLTYEEVATK

SEQ ID NO: 281238 - protein, 15 aa, Artificial Sequence
  Description of Artificial Sequence: Synthetic peptide
  Seed: HIHIFSFTGEEMATK
HIHMFSMTAEEAATK

SEQ ID NO: 281239 - protein, 15 aa, Artificial Sequence
  Description of Artificial Sequence: Synthetic peptide
  Seed: HIHIFSFTGEEMATK
HIHMFSMTAEEIATK

SEQ ID NO: 281240 - protein, 15 aa, Artificial Sequence
  Description of Artificial Sequence: Synthetic peptide
  Seed: HIHIFSFTGEEMATK
HIHMFSMTAEELATK

SEQ ID NO: 281241 - protein, 15 aa, Artificial Sequence
  Description of Artificial Sequence: Synthetic peptide
  Seed: HIHIFSFTGEEMATK
HIHMFSMTAEEMATK

SEQ ID NO: 281242 - protein, 15 aa, Artificial Sequence
  Description of Artificial Sequence: Synthetic peptide
  Seed: HIHIFSFTGEEMATK
HIHMFSMTAEENATK

SEQ ID NO: 281243 - protein, 15 aa, Artificial Sequence
  Description of Artificial Sequence: Synthetic peptide
  Seed: HIHIFSFTGEEMATK
HIHMFSMTAEESATK

SEQ ID NO: 281244 - protein, 15 aa, Artificial Sequence
  Description of Artificial Sequence: Synthetic peptide
  Seed: HIHIFSFTGEEMATK
HIHMFSMTAEETATK

SEQ ID NO: 281245 - protein, 15 aa, Artificial Sequence
  Description of Artificial Sequence: Synthetic peptide
  Seed: HIHIFSFTGEEMATK
HIHMFSMTAEEVATK

SEQ ID NO: 281246 - protein, 15 aa, Artificial Sequence
  Description of Artificial Sequence: Synthetic peptide
  Seed: HIHIFSFTGEEMATK
HIHMFSMTFEEAATK

SEQ ID NO: 281247 - protein, 15 aa, Artificial Sequence
  Description of Artificial Sequence: Synthetic peptide
  Seed: HIHIFSFTGEEMATK
HIHMFSMTFEEFATK

SEQ ID NO: 281248 - protein, 15 aa, Artificial Sequence
  Description of Artificial Sequence: Synthetic peptide
  Seed: HIHIFSFTGEEMATK
HIHMFSMTFEEIATK

SEQ ID NO: 281249 - protein, 15 aa, Artificial Sequence
  Description of Artificial Sequence: Synthetic peptide
  Seed: HIHIFSFTGEEMATK
HIHMFSMTFEELATK

SEQ ID NO: 281250 - protein, 15 aa, Artificial Sequence
  Description of Artificial Sequence: Synthetic peptide
  Seed: HIHIFSFTGEEMATK
HIHMFSMTFEEMATK

SEQ ID NO: 281251 - protein, 15 aa, Artificial Sequence
  Description of Artificial Sequence: Synthetic peptide
  Seed: HIHIFSFTGEEMATK
HIHMFSMTFEENATK

SEQ ID NO: 281252 - protein, 15 aa, Artificial Sequence
  Description of Artificial Sequence: Synthetic peptide
  Seed: HIHIFSFTGEEMATK
HIHMFSMTFEESATK

SEQ ID NO: 281253 - protein, 15 aa, Artificial Sequence
  Description of Artificial Sequence: Synthetic peptide
  Seed: HIHIFSFTGEEMATK
HIHMFSMTFEETATK

SEQ ID NO: 281254 - protein, 15 aa, Artificial Sequence
  Description of Artificial Sequence: Synthetic peptide
  Seed: HIHIFSFTGEEMATK
HIHMFSMTFEEVATK

SEQ ID NO: 281255 - protein, 15 aa, Artificial Sequence
  Description of Artificial Sequence: Synthetic peptide
  Seed: HIHIFSFTGEEMATK
HIHMFSMTFEEYATK

SEQ ID NO: 281256 - protein, 15 aa, Artificial Sequence
  Description of Artificial Sequence: Synthetic peptide
  Seed: HIHIFSFTGEEMATK
HIHMFSMTGEEAATK

SEQ ID NO: 281257 - protein, 15 aa, Artificial Sequence
  Description of Artificial Sequence: Synthetic peptide
  Seed: HIHIFSFTGEEMATK
HIHMFSMTGEEIATK

SEQ ID NO: 281258 - protein, 15 aa, Artificial Sequence
  Description of Artificial Sequence: Synthetic peptide
  Seed: HIHIFSFTGEEMATK
HIHMFSMTGEELATK

SEQ ID NO: 281259 - protein, 15 aa, Artificial Sequence
  Description of Artificial Sequence: Synthetic peptide
  Seed: HIHIFSFTGEEMATK
HIHMFSMTGEEVATK

SEQ ID NO: 281260 - protein, 15 aa, Artificial Sequence
  Description of Artificial Sequence: Synthetic peptide
  Seed: HIHIFSFTGEEMATK
HIHMFSMTIEEAATK

SEQ ID NO: 281261 - protein, 15 aa, Artificial Sequence
  Description of Artificial Sequence: Synthetic peptide
  Seed: HIHIFSFTGEEMATK
HIHMFSMTIEEMATK

SEQ ID NO: 281262 - protein, 15 aa, Artificial Sequence
  Description of Artificial Sequence: Synthetic peptide
  Seed: HIHIFSFTGEEMATK
HIHMFSMTIEESATK

SEQ ID NO: 281263 - protein, 15 aa, Artificial Sequence
  Description of Artificial Sequence: Synthetic peptide
  Seed: HIHIFSFTGEEMATK
HIHMFSMTLEELATK

SEQ ID NO: 281264 - protein, 15 aa, Artificial Sequence
  Description of Artificial Sequence: Synthetic peptide
  Seed: HIHIFSFTGEEMATK
HIHMFSMTPEEAATK

SEQ ID NO: 281265 - protein, 15 aa, Artificial Sequence
  Description of Artificial Sequence: Synthetic peptide
  Seed: HIHIFSFTGEEMATK
HIHMFSMTPEESATK

SEQ ID NO: 281266 - protein, 15 aa, Artificial Sequence
  Description of Artificial Sequence: Synthetic peptide
  Seed: HIHIFSFTGEEMATK
HIHMFSMTSEEAATK

SEQ ID NO: 281267 - protein, 15 aa, Artificial Sequence
  Description of Artificial Sequence: Synthetic peptide
  Seed: HIHIFSFTGEEMATK
HIHMFSMTSEEIATK

SEQ ID NO: 281268 - protein, 15 aa, Artificial Sequence
  Description of Artificial Sequence: Synthetic peptide
  Seed: HIHIFSFTGEEMATK
HIHMFSMTSEELATK

SEQ ID NO: 281269 - protein, 15 aa, Artificial Sequence
  Description of Artificial Sequence: Synthetic peptide
  Seed: HIHIFSFTGEEMATK
HIHMFSMTSEESATK

SEQ ID NO: 281270 - protein, 15 aa, Artificial Sequence
  Description of Artificial Sequence: Synthetic peptide
  Seed: HIHIFSFTGEEMATK
HIHMFSMTSEEVATK

SEQ ID NO: 281271 - protein, 15 aa, Artificial Sequence
  Description of Artificial Sequence: Synthetic peptide
  Seed: HIHIFSFTGEEMATK
HIHMFSMTTEEAATK

SEQ ID NO: 281272 - protein, 15 aa, Artificial Sequence
  Description of Artificial Sequence: Synthetic peptide
  Seed: HIHIFSFTGEEMATK
HIHMFSMTVEEAATK

SEQ ID NO: 281273 - protein, 15 aa, Artificial Sequence
  Description of Artificial Sequence: Synthetic peptide
  Seed: HIHIFSFTGEEMATK
HIHMFSMTVEEMATK

SEQ ID NO: 281274 - protein, 15 aa, Artificial Sequence
  Description of Artificial Sequence: Synthetic peptide
  Seed: HIHIFSFTGEEMATK
HIHMFSMTVEENATK

SEQ ID NO: 281275 - protein, 15 aa, Artificial Sequence
  Description of Artificial Sequence: Synthetic peptide
  Seed: HIHIFSFTGEEMATK
HIHMFSMTVEESATK

SEQ ID NO: 281276 - protein, 15 aa, Artificial Sequence
  Description of Artificial Sequence: Synthetic peptide
  Seed: HIHIFSFTGEEMATK
HIHMFSMTVEETATK

SEQ ID NO: 281277 - protein, 15 aa, Artificial Sequence
  Description of Artificial Sequence: Synthetic peptide
  Seed: HIHIFSFTGEEMATK
HIHMFSMTWEELATK

SEQ ID NO: 281278 - protein, 15 aa, Artificial Sequence
  Description of Artificial Sequence: Synthetic peptide
  Seed: HIHIFSFTGEEMATK
HIHMFSMTYEEFATK

SEQ ID NO: 281279 - protein, 15 aa, Artificial Sequence
  Description of Artificial Sequence: Synthetic peptide
  Seed: HIHIFSFTGEEMATK
HIHMFSMTYEEIATK

SEQ ID NO: 281280 - protein, 15 aa, Artificial Sequence
  Description of Artificial Sequence: Synthetic peptide
  Seed: HIHIFSFTGEEMATK
HIHMFSMTYEELATK

SEQ ID NO: 281281 - protein, 15 aa, Artificial Sequence
  Description of Artificial Sequence: Synthetic peptide
  Seed: HIHIFSFTGEEMATK
HIHMFSMTYEEVATK

SEQ ID NO: 281282 - protein, 15 aa, Artificial Sequence
  Description of Artificial Sequence: Synthetic peptide
  Seed: HIHIFSFTGEEMATK
HIHMFSNTFEEFATK

SEQ ID NO: 281283 - protein, 15 aa, Artificial Sequence
  Description of Artificial Sequence: Synthetic peptide
  Seed: HIHIFSFTGEEMATK
HIHMFSNTFEEIATK

SEQ ID NO: 281284 - protein, 15 aa, Artificial Sequence
  Description of Artificial Sequence: Synthetic peptide
  Seed: HIHIFSFTGEEMATK
HIHMFSNTFEELATK

SEQ ID NO: 281285 - protein, 15 aa, Artificial Sequence
  Description of Artificial Sequence: Synthetic peptide
  Seed: HIHIFSFTGEEMATK
HIHMFSNTFEEVATK

SEQ ID NO: 281286 - protein, 15 aa, Artificial Sequence
  Description of Artificial Sequence: Synthetic peptide
  Seed: HIHIFSFTGEEMATK
HIHMFSQTFEEFATK

SEQ ID NO: 281287 - protein, 15 aa, Artificial Sequence
  Description of Artificial Sequence: Synthetic peptide
  Seed: HIHIFSFTGEEMATK
HIHMFSQTFEEIATK

SEQ ID NO: 281288 - protein, 15 aa, Artificial Sequence
  Description of Artificial Sequence: Synthetic peptide
  Seed: HIHIFSFTGEEMATK
HIHMFSQTFEELATK

SEQ ID NO: 281289 - protein, 15 aa, Artificial Sequence
  Description of Artificial Sequence: Synthetic peptide
  Seed: HIHIFSFTGEEMATK
HIHMFSQTFEEMATK

SEQ ID NO: 281290 - protein, 15 aa, Artificial Sequence
  Description of Artificial Sequence: Synthetic peptide
  Seed: HIHIFSFTGEEMATK
HIHMFSQTFEEVATK

SEQ ID NO: 281291 - protein, 15 aa, Artificial Sequence
  Description of Artificial Sequence: Synthetic peptide
  Seed: HIHIFSFTGEEMATK
HIHMFSQTFEEYATK

SEQ ID NO: 281292 - protein, 15 aa, Artificial Sequence
  Description of Artificial Sequence: Synthetic peptide
  Seed: HIHIFSFTGEEMATK
HIHMFSRTFEEIATK

SEQ ID NO: 281293 - protein, 15 aa, Artificial Sequence
  Description of Artificial Sequence: Synthetic peptide
  Seed: HIHIFSFTGEEMATK
HIHMFSRTFEELATK

SEQ ID NO: 281294 - protein, 15 aa, Artificial Sequence
  Description of Artificial Sequence: Synthetic peptide
  Seed: HIHIFSFTGEEMATK
HIHMFSRTFEEVATK

SEQ ID NO: 281295 - protein, 15 aa, Artificial Sequence
  Description of Artificial Sequence: Synthetic peptide
  Seed: HIHIFSFTGEEMATK
HIHMFSSTFEEAATK

SEQ ID NO: 281296 - protein, 15 aa, Artificial Sequence
  Description of Artificial Sequence: Synthetic peptide
  Seed: HIHIFSFTGEEMATK
HIHMFSSTFEEFATK

SEQ ID NO: 281297 - protein, 15 aa, Artificial Sequence
  Description of Artificial Sequence: Synthetic peptide
  Seed: HIHIFSFTGEEMATK
HIHMFSSTFEEIATK

SEQ ID NO: 281298 - protein, 15 aa, Artificial Sequence
  Description of Artificial Sequence: Synthetic peptide
  Seed: HIHIFSFTGEEMATK
HIHMFSSTFEELATK

SEQ ID NO: 281299 - protein, 15 aa, Artificial Sequence
  Description of Artificial Sequence: Synthetic peptide
  Seed: HIHIFSFTGEEMATK
HIHMFSSTFEEMATK

SEQ ID NO: 281300 - protein, 15 aa, Artificial Sequence
  Description of Artificial Sequence: Synthetic peptide
  Seed: HIHIFSFTGEEMATK
HIHMFSSTFEESATK

SEQ ID NO: 281301 - protein, 15 aa, Artificial Sequence
  Description of Artificial Sequence: Synthetic peptide
  Seed: HIHIFSFTGEEMATK
HIHMFSSTFEETATK

SEQ ID NO: 281302 - protein, 15 aa, Artificial Sequence
  Description of Artificial Sequence: Synthetic peptide
  Seed: HIHIFSFTGEEMATK
HIHMFSSTFEEVATK

SEQ ID NO: 281303 - protein, 15 aa, Artificial Sequence
  Description of Artificial Sequence: Synthetic peptide
  Seed: HIHIFSFTGEEMATK
HIHMFSSTFEEYATK

SEQ ID NO: 281304 - protein, 15 aa, Artificial Sequence
  Description of Artificial Sequence: Synthetic peptide
  Seed: HIHIFSFTGEEMATK
HIHMFSSTLEELATK

SEQ ID NO: 281305 - protein, 15 aa, Artificial Sequence
  Description of Artificial Sequence: Synthetic peptide
  Seed: HIHIFSFTGEEMATK
HIHMFSSTWEELATK

SEQ ID NO: 281306 - protein, 15 aa, Artificial Sequence
  Description of Artificial Sequence: Synthetic peptide
  Seed: HIHIFSFTGEEMATK
HIHMFSSTYEEIATK

SEQ ID NO: 281307 - protein, 15 aa, Artificial Sequence
  Description of Artificial Sequence: Synthetic peptide
  Seed: HIHIFSFTGEEMATK
HIHMFSSTYEELATK

SEQ ID NO: 281308 - protein, 15 aa, Artificial Sequence
  Description of Artificial Sequence: Synthetic peptide
  Seed: HIHIFSFTGEEMATK
HIHMFSSTYEEVATK

SEQ ID NO: 281309 - protein, 15 aa, Artificial Sequence
  Description of Artificial Sequence: Synthetic peptide
  Seed: HIHIFSFTGEEMATK
HIHMFSTTFEEAATK

SEQ ID NO: 281310 - protein, 15 aa, Artificial Sequence
  Description of Artificial Sequence: Synthetic peptide
  Seed: HIHIFSFTGEEMATK
HIHMFSTTFEEEATK

SEQ ID NO: 281311 - protein, 15 aa, Artificial Sequence
  Description of Artificial Sequence: Synthetic peptide
  Seed: HIHIFSFTGEEMATK
HIHMFSTTFEEFATK

SEQ ID NO: 281312 - protein, 15 aa, Artificial Sequence
  Description of Artificial Sequence: Synthetic peptide
  Seed: HIHIFSFTGEEMATK
HIHMFSTTFEEIATK

SEQ ID NO: 281313 - protein, 15 aa, Artificial Sequence
  Description of Artificial Sequence: Synthetic peptide
  Seed: HIHIFSFTGEEMATK
HIHMFSTTFEELATK

SEQ ID NO: 281314 - protein, 15 aa, Artificial Sequence
  Description of Artificial Sequence: Synthetic peptide
  Seed: HIHIFSFTGEEMATK
HIHMFSTTFEEMATK

SEQ ID NO: 281315 - protein, 15 aa, Artificial Sequence
  Description of Artificial Sequence: Synthetic peptide
  Seed: HIHIFSFTGEEMATK
HIHMFSTTFEENATK

SEQ ID NO: 281316 - protein, 15 aa, Artificial Sequence
  Description of Artificial Sequence: Synthetic peptide
  Seed: HIHIFSFTGEEMATK
HIHMFSTTFEESATK

SEQ ID NO: 281317 - protein, 15 aa, Artificial Sequence
  Description of Artificial Sequence: Synthetic peptide
  Seed: HIHIFSFTGEEMATK
HIHMFSTTFEETATK

SEQ ID NO: 281318 - protein, 15 aa, Artificial Sequence
  Description of Artificial Sequence: Synthetic peptide
  Seed: HIHIFSFTGEEMATK
HIHMFSTTFEEVATK

SEQ ID NO: 281319 - protein, 15 aa, Artificial Sequence
  Description of Artificial Sequence: Synthetic peptide
  Seed: HIHIFSFTGEEMATK
HIHMFSTTFEEWATK

SEQ ID NO: 281320 - protein, 15 aa, Artificial Sequence
  Description of Artificial Sequence: Synthetic peptide
  Seed: HIHIFSFTGEEMATK
HIHMFSTTFEEYATK

SEQ ID NO: 281321 - protein, 15 aa, Artificial Sequence
  Description of Artificial Sequence: Synthetic peptide
  Seed: HIHIFSFTGEEMATK
HIHMFSTTIEELATK

SEQ ID NO: 281322 - protein, 15 aa, Artificial Sequence
  Description of Artificial Sequence: Synthetic peptide
  Seed: HIHIFSFTGEEMATK
HIHMFSTTLEEFATK

SEQ ID NO: 281323 - protein, 15 aa, Artificial Sequence
  Description of Artificial Sequence: Synthetic peptide
  Seed: HIHIFSFTGEEMATK
HIHMFSTTLEEIATK

SEQ ID NO: 281324 - protein, 15 aa, Artificial Sequence
  Description of Artificial Sequence: Synthetic peptide
  Seed: HIHIFSFTGEEMATK
HIHMFSTTLEELATK

SEQ ID NO: 281325 - protein, 15 aa, Artificial Sequence
  Description of Artificial Sequence: Synthetic peptide
  Seed: HIHIFSFTGEEMATK
HIHMFSTTLEEVATK

SEQ ID NO: 281326 - protein, 15 aa, Artificial Sequence
  Description of Artificial Sequence: Synthetic peptide
  Seed: HIHIFSFTGEEMATK
HIHMFSTTWEEFATK

SEQ ID NO: 281327 - protein, 15 aa, Artificial Sequence
  Description of Artificial Sequence: Synthetic peptide
  Seed: HIHIFSFTGEEMATK
HIHMFSTTWEEIATK

SEQ ID NO: 281328 - protein, 15 aa, Artificial Sequence
  Description of Artificial Sequence: Synthetic peptide
  Seed: HIHIFSFTGEEMATK
HIHMFSTTWEELATK

SEQ ID NO: 281329 - protein, 15 aa, Artificial Sequence
  Description of Artificial Sequence: Synthetic peptide
  Seed: HIHIFSFTGEEMATK
HIHMFSTTWEEVATK

SEQ ID NO: 281330 - protein, 15 aa, Artificial Sequence
  Description of Artificial Sequence: Synthetic peptide
  Seed: HIHIFSFTGEEMATK
HIHMFSTTYEEFATK

SEQ ID NO: 281331 - protein, 15 aa, Artificial Sequence
  Description of Artificial Sequence: Synthetic peptide
  Seed: HIHIFSFTGEEMATK
HIHMFSTTYEEIATK

SEQ ID NO: 281332 - protein, 15 aa, Artificial Sequence
  Description of Artificial Sequence: Synthetic peptide
  Seed: HIHIFSFTGEEMATK
HIHMFSTTYEELATK

SEQ ID NO: 281333 - protein, 15 aa, Artificial Sequence
  Description of Artificial Sequence: Synthetic peptide
  Seed: HIHIFSFTGEEMATK
HIHMFSTTYEEVATK

SEQ ID NO: 281334 - protein, 15 aa, Artificial Sequence
  Description of Artificial Sequence: Synthetic peptide
  Seed: HIHIFSFTGEEMATK
HIHMFSVTFEEAATK

SEQ ID NO: 281335 - protein, 15 aa, Artificial Sequence
  Description of Artificial Sequence: Synthetic peptide
  Seed: HIHIFSFTGEEMATK
HIHMFSVTFEEDATK

SEQ ID NO: 281336 - protein, 15 aa, Artificial Sequence
  Description of Artificial Sequence: Synthetic peptide
  Seed: HIHIFSFTGEEMATK
HIHMFSVTFEEEATK

SEQ ID NO: 281337 - protein, 15 aa, Artificial Sequence
  Description of Artificial Sequence: Synthetic peptide
  Seed: HIHIFSFTGEEMATK
HIHMFSVTFEEFATK

SEQ ID NO: 281338 - protein, 15 aa, Artificial Sequence
  Description of Artificial Sequence: Synthetic peptide
  Seed: HIHIFSFTGEEMATK
HIHMFSVTFEEHATK

SEQ ID NO: 281339 - protein, 15 aa, Artificial Sequence
  Description of Artificial Sequence: Synthetic peptide
  Seed: HIHIFSFTGEEMATK
HIHMFSVTFEEIATK

SEQ ID NO: 281340 - protein, 15 aa, Artificial Sequence
  Description of Artificial Sequence: Synthetic peptide
  Seed: HIHIFSFTGEEMATK
HIHMFSVTFEELATK

SEQ ID NO: 281341 - protein, 15 aa, Artificial Sequence
  Description of Artificial Sequence: Synthetic peptide
  Seed: HIHIFSFTGEEMATK
HIHMFSVTFEEMATK

SEQ ID NO: 281342 - protein, 15 aa, Artificial Sequence
  Description of Artificial Sequence: Synthetic peptide
  Seed: HIHIFSFTGEEMATK
HIHMFSVTFEENATK

SEQ ID NO: 281343 - protein, 15 aa, Artificial Sequence
  Description of Artificial Sequence: Synthetic peptide
  Seed: HIHIFSFTGEEMATK
HIHMFSVTFEESATK

SEQ ID NO: 281344 - protein, 15 aa, Artificial Sequence
  Description of Artificial Sequence: Synthetic peptide
  Seed: HIHIFSFTGEEMATK
HIHMFSVTFEETATK

SEQ ID NO: 281345 - protein, 15 aa, Artificial Sequence
  Description of Artificial Sequence: Synthetic peptide
  Seed: HIHIFSFTGEEMATK
HIHMFSVTFEEVATK

SEQ ID NO: 281346 - protein, 15 aa, Artificial Sequence
  Description of Artificial Sequence: Synthetic peptide
  Seed: HIHIFSFTGEEMATK
HIHMFSVTFEEYATK

SEQ ID NO: 281347 - protein, 15 aa, Artificial Sequence
  Description of Artificial Sequence: Synthetic peptide
  Seed: HIHIFSFTGEEMATK
HIHMFSVTIEELATK

SEQ ID NO: 281348 - protein, 15 aa, Artificial Sequence
  Description of Artificial Sequence: Synthetic peptide
  Seed: HIHIFSFTGEEMATK
HIHMFSVTLEEFATK

SEQ ID NO: 281349 - protein, 15 aa, Artificial Sequence
  Description of Artificial Sequence: Synthetic peptide
  Seed: HIHIFSFTGEEMATK
HIHMFSVTLEEIATK

SEQ ID NO: 281350 - protein, 15 aa, Artificial Sequence
  Description of Artificial Sequence: Synthetic peptide
  Seed: HIHIFSFTGEEMATK
HIHMFSVTLEELATK

SEQ ID NO: 281351 - protein, 15 aa, Artificial Sequence
  Description of Artificial Sequence: Synthetic peptide
  Seed: HIHIFSFTGEEMATK
HIHMFSVTLEEVATK

SEQ ID NO: 281352 - protein, 15 aa, Artificial Sequence
  Description of Artificial Sequence: Synthetic peptide
  Seed: HIHIFSFTGEEMATK
HIHMFSVTWEEFATK

SEQ ID NO: 281353 - protein, 15 aa, Artificial Sequence
  Description of Artificial Sequence: Synthetic peptide
  Seed: HIHIFSFTGEEMATK
HIHMFSVTWEEIATK

SEQ ID NO: 281354 - protein, 15 aa, Artificial Sequence
  Description of Artificial Sequence: Synthetic peptide
  Seed: HIHIFSFTGEEMATK
HIHMFSVTWEELATK

SEQ ID NO: 281355 - protein, 15 aa, Artificial Sequence
  Description of Artificial Sequence: Synthetic peptide
  Seed: HIHIFSFTGEEMATK
HIHMFSVTWEEVATK

SEQ ID NO: 281356 - protein, 15 aa, Artificial Sequence
  Description of Artificial Sequence: Synthetic peptide
  Seed: HIHIFSFTGEEMATK
HIHMFSVTYEEFATK

SEQ ID NO: 281357 - protein, 15 aa, Artificial Sequence
  Description of Artificial Sequence: Synthetic peptide
  Seed: HIHIFSFTGEEMATK
HIHMFSVTYEEIATK

SEQ ID NO: 281358 - protein, 15 aa, Artificial Sequence
  Description of Artificial Sequence: Synthetic peptide
  Seed: HIHIFSFTGEEMATK
HIHMFSVTYEELATK

SEQ ID NO: 281359 - protein, 15 aa, Artificial Sequence
  Description of Artificial Sequence: Synthetic peptide
  Seed: HIHIFSFTGEEMATK
HIHMFSVTYEEMATK

SEQ ID NO: 281360 - protein, 15 aa, Artificial Sequence
  Description of Artificial Sequence: Synthetic peptide
  Seed: HIHIFSFTGEEMATK
HIHMFSVTYEEVATK

SEQ ID NO: 281361 - protein, 15 aa, Artificial Sequence
  Description of Artificial Sequence: Synthetic peptide
  Seed: HIHIFSFTGEEMATK
HIHMFSWTFEEFATK

SEQ ID NO: 281362 - protein, 15 aa, Artificial Sequence
  Description of Artificial Sequence: Synthetic peptide
  Seed: HIHIFSFTGEEMATK
HIHMFSWTFEEIATK

SEQ ID NO: 281363 - protein, 15 aa, Artificial Sequence
  Description of Artificial Sequence: Synthetic peptide
  Seed: HIHIFSFTGEEMATK
HIHMFSWTFEELATK

SEQ ID NO: 281364 - protein, 15 aa, Artificial Sequence
  Description of Artificial Sequence: Synthetic peptide
  Seed: HIHIFSFTGEEMATK
HIHMFSWTFEEMATK

SEQ ID NO: 281365 - protein, 15 aa, Artificial Sequence
  Description of Artificial Sequence: Synthetic peptide
  Seed: HIHIFSFTGEEMATK
HIHMFSWTFEEVATK

SEQ ID NO: 281366 - protein, 15 aa, Artificial Sequence
  Description of Artificial Sequence: Synthetic peptide
  Seed: HIHIFSFTGEEMATK
HIHMFSWTLEELATK

SEQ ID NO: 281367 - protein, 15 aa, Artificial Sequence
  Description of Artificial Sequence: Synthetic peptide
  Seed: HIHIFSFTGEEMATK
HIHMFSYTFEEAATK

SEQ ID NO: 281368 - protein, 15 aa, Artificial Sequence
  Description of Artificial Sequence: Synthetic peptide
  Seed: HIHIFSFTGEEMATK
HIHMFSYTFEEFATK

SEQ ID NO: 281369 - protein, 15 aa, Artificial Sequence
  Description of Artificial Sequence: Synthetic peptide
  Seed: HIHIFSFTGEEMATK
HIHMFSYTFEEIATK

SEQ ID NO: 281370 - protein, 15 aa, Artificial Sequence
  Description of Artificial Sequence: Synthetic peptide
  Seed: HIHIFSFTGEEMATK
HIHMFSYTFEELATK

SEQ ID NO: 281371 - protein, 15 aa, Artificial Sequence
  Description of Artificial Sequence: Synthetic peptide
  Seed: HIHIFSFTGEEMATK
HIHMFSYTFEEMATK

SEQ ID NO: 281372 - protein, 15 aa, Artificial Sequence
  Description of Artificial Sequence: Synthetic peptide
  Seed: HIHIFSFTGEEMATK
HIHMFSYTFEETATK

SEQ ID NO: 281373 - protein, 15 aa, Artificial Sequence
  Description of Artificial Sequence: Synthetic peptide
  Seed: HIHIFSFTGEEMATK
HIHMFSYTFEEVATK

SEQ ID NO: 281374 - protein, 15 aa, Artificial Sequence
  Description of Artificial Sequence: Synthetic peptide
  Seed: HIHIFSFTGEEMATK
HIHMFSYTFEEYATK

SEQ ID NO: 281375 - protein, 15 aa, Artificial Sequence
  Description of Artificial Sequence: Synthetic peptide
  Seed: HIHIFSFTGEEMATK
HIHMFSYTLEEFATK

SEQ ID NO: 281376 - protein, 15 aa, Artificial Sequence
  Description of Artificial Sequence: Synthetic peptide
  Seed: HIHIFSFTGEEMATK
HIHMFSYTLEEIATK

SEQ ID NO: 281377 - protein, 15 aa, Artificial Sequence
  Description of Artificial Sequence: Synthetic peptide
  Seed: HIHIFSFTGEEMATK
HIHMFSYTLEELATK

SEQ ID NO: 281378 - protein, 15 aa, Artificial Sequence
  Description of Artificial Sequence: Synthetic peptide
  Seed: HIHIFSFTGEEMATK
HIHMFSYTLEEMATK

SEQ ID NO: 281379 - protein, 15 aa, Artificial Sequence
  Description of Artificial Sequence: Synthetic peptide
  Seed: HIHIFSFTGEEMATK
HIHMFSYTLEEVATK

SEQ ID NO: 281380 - protein, 15 aa, Artificial Sequence
  Description of Artificial Sequence: Synthetic peptide
  Seed: HIHIFSFTGEEMATK
HIHMFSYTMEELATK

SEQ ID NO: 281381 - protein, 15 aa, Artificial Sequence
  Description of Artificial Sequence: Synthetic peptide
  Seed: HIHIFSFTGEEMATK
HIHMFSYTYEELATK

SEQ ID NO: 281382 - protein, 15 aa, Artificial Sequence
  Description of Artificial Sequence: Synthetic peptide
  Seed: HIHIFSFTGEEMATK
HIHNFSITFEELATK

SEQ ID NO: 281383 - protein, 15 aa, Artificial Sequence
  Description of Artificial Sequence: Synthetic peptide
  Seed: HIHIFSFTGEEMATK
HIHQFSFTFEEFATK

SEQ ID NO: 281384 - protein, 15 aa, Artificial Sequence
  Description of Artificial Sequence: Synthetic peptide
  Seed: HIHIFSFTGEEMATK
HIHQFSFTFEEIATK

SEQ ID NO: 281385 - protein, 15 aa, Artificial Sequence
  Description of Artificial Sequence: Synthetic peptide
  Seed: HIHIFSFTGEEMATK
HIHQFSFTFEELATK

SEQ ID NO: 281386 - protein, 15 aa, Artificial Sequence
  Description of Artificial Sequence: Synthetic peptide
  Seed: HIHIFSFTGEEMATK
HIHQFSITFEEIATK

SEQ ID NO: 281387 - protein, 15 aa, Artificial Sequence
  Description of Artificial Sequence: Synthetic peptide
  Seed: HIHIFSFTGEEMATK
HIHQFSITFEELATK

SEQ ID NO: 281388 - protein, 15 aa, Artificial Sequence
  Description of Artificial Sequence: Synthetic peptide
  Seed: HIHIFSFTGEEMATK
HIHQFSITFEEVATK

SEQ ID NO: 281389 - protein, 15 aa, Artificial Sequence
  Description of Artificial Sequence: Synthetic peptide
  Seed: HIHIFSFTGEEMATK
HIHQFSVTFEELATK

SEQ ID NO: 281390 - protein, 15 aa, Artificial Sequence
  Description of Artificial Sequence: Synthetic peptide
  Seed: HIHIFSFTGEEMATK
HIHRFSFTFEEFATK

SEQ ID NO: 281391 - protein, 15 aa, Artificial Sequence
  Description of Artificial Sequence: Synthetic peptide
  Seed: HIHIFSFTGEEMATK
HIHRFSFTFEEIATK

SEQ ID NO: 281392 - protein, 15 aa, Artificial Sequence
  Description of Artificial Sequence: Synthetic peptide
  Seed: HIHIFSFTGEEMATK
HIHRFSFTFEELATK

SEQ ID NO: 281393 - protein, 15 aa, Artificial Sequence
  Description of Artificial Sequence: Synthetic peptide
  Seed: HIHIFSFTGEEMATK
HIHRFSFTFEEMATK

SEQ ID NO: 281394 - protein, 15 aa, Artificial Sequence
  Description of Artificial Sequence: Synthetic peptide
  Seed: HIHIFSFTGEEMATK
HIHRFSFTFEEVATK

SEQ ID NO: 281395 - protein, 15 aa, Artificial Sequence
  Description of Artificial Sequence: Synthetic peptide
  Seed: HIHIFSFTGEEMATK
HIHRFSITFEEFATK

SEQ ID NO: 281396 - protein, 15 aa, Artificial Sequence
  Description of Artificial Sequence: Synthetic peptide
  Seed: HIHIFSFTGEEMATK
HIHRFSITFEEIATK

SEQ ID NO: 281397 - protein, 15 aa, Artificial Sequence
  Description of Artificial Sequence: Synthetic peptide
  Seed: HIHIFSFTGEEMATK
HIHRFSITFEELATK

SEQ ID NO: 281398 - protein, 15 aa, Artificial Sequence
  Description of Artificial Sequence: Synthetic peptide
  Seed: HIHIFSFTGEEMATK
HIHRFSITFEEVATK

SEQ ID NO: 281399 - protein, 15 aa, Artificial Sequence
  Description of Artificial Sequence: Synthetic peptide
  Seed: HIHIFSFTGEEMATK
HIHRFSLTFEEFATK

SEQ ID NO: 281400 - protein, 15 aa, Artificial Sequence
  Description of Artificial Sequence: Synthetic peptide
  Seed: HIHIFSFTGEEMATK
HIHRFSLTFEEIATK

SEQ ID NO: 281401 - protein, 15 aa, Artificial Sequence
  Description of Artificial Sequence: Synthetic peptide
  Seed: HIHIFSFTGEEMATK
HIHRFSLTFEELATK

SEQ ID NO: 281402 - protein, 15 aa, Artificial Sequence
  Description of Artificial Sequence: Synthetic peptide
  Seed: HIHIFSFTGEEMATK
HIHRFSLTFEEVATK

SEQ ID NO: 281403 - protein, 15 aa, Artificial Sequence
  Description of Artificial Sequence: Synthetic peptide
  Seed: HIHIFSFTGEEMATK
HIHRFSMTFEEFATK

SEQ ID NO: 281404 - protein, 15 aa, Artificial Sequence
  Description of Artificial Sequence: Synthetic peptide
  Seed: HIHIFSFTGEEMATK
HIHRFSMTFEEIATK

SEQ ID NO: 281405 - protein, 15 aa, Artificial Sequence
  Description of Artificial Sequence: Synthetic peptide
  Seed: HIHIFSFTGEEMATK
HIHRFSMTFEELATK

SEQ ID NO: 281406 - protein, 15 aa, Artificial Sequence
  Description of Artificial Sequence: Synthetic peptide
  Seed: HIHIFSFTGEEMATK
HIHRFSSTFEEIATK

SEQ ID NO: 281407 - protein, 15 aa, Artificial Sequence
  Description of Artificial Sequence: Synthetic peptide
  Seed: HIHIFSFTGEEMATK
HIHRFSSTFEELATK

SEQ ID NO: 281408 - protein, 15 aa, Artificial Sequence
  Description of Artificial Sequence: Synthetic peptide
  Seed: HIHIFSFTGEEMATK
HIHRFSTTFEEIATK

SEQ ID NO: 281409 - protein, 15 aa, Artificial Sequence
  Description of Artificial Sequence: Synthetic peptide
  Seed: HIHIFSFTGEEMATK
HIHRFSTTFEELATK

SEQ ID NO: 281410 - protein, 15 aa, Artificial Sequence
  Description of Artificial Sequence: Synthetic peptide
  Seed: HIHIFSFTGEEMATK
HIHRFSVTFEEFATK

SEQ ID NO: 281411 - protein, 15 aa, Artificial Sequence
  Description of Artificial Sequence: Synthetic peptide
  Seed: HIHIFSFTGEEMATK
HIHRFSVTFEEIATK

SEQ ID NO: 281412 - protein, 15 aa, Artificial Sequence
  Description of Artificial Sequence: Synthetic peptide
  Seed: HIHIFSFTGEEMATK
HIHRFSVTFEELATK

SEQ ID NO: 281413 - protein, 15 aa, Artificial Sequence
  Description of Artificial Sequence: Synthetic peptide
  Seed: HIHIFSFTGEEMATK
HIHRFSVTFEEVATK

SEQ ID NO: 281414 - protein, 15 aa, Artificial Sequence
  Description of Artificial Sequence: Synthetic peptide
  Seed: HIHIFSFTGEEMATK
HIHSFSFTFEEIATK

SEQ ID NO: 281415 - protein, 15 aa, Artificial Sequence
  Description of Artificial Sequence: Synthetic peptide
  Seed: HIHIFSFTGEEMATK
HIHSFSFTFEELATK

SEQ ID NO: 281416 - protein, 15 aa, Artificial Sequence
  Description of Artificial Sequence: Synthetic peptide
  Seed: HIHIFSFTGEEMATK
HIHSFSFTFEEVATK

SEQ ID NO: 281417 - protein, 15 aa, Artificial Sequence
  Description of Artificial Sequence: Synthetic peptide
  Seed: HIHIFSFTGEEMATK
HIHSFSITFEEIATK

SEQ ID NO: 281418 - protein, 15 aa, Artificial Sequence
  Description of Artificial Sequence: Synthetic peptide
  Seed: HIHIFSFTGEEMATK
HIHSFSITFEELATK

SEQ ID NO: 281419 - protein, 15 aa, Artificial Sequence
  Description of Artificial Sequence: Synthetic peptide
  Seed: HIHIFSFTGEEMATK
HIHTFSFTFEEFATK

SEQ ID NO: 281420 - protein, 15 aa, Artificial Sequence
  Description of Artificial Sequence: Synthetic peptide
  Seed: HIHIFSFTGEEMATK
HIHTFSFTFEEIATK

SEQ ID NO: 281421 - protein, 15 aa, Artificial Sequence
  Description of Artificial Sequence: Synthetic peptide
  Seed: HIHIFSFTGEEMATK
HIHTFSFTFEELATK

SEQ ID NO: 281422 - protein, 15 aa, Artificial Sequence
  Description of Artificial Sequence: Synthetic peptide
  Seed: HIHIFSFTGEEMATK
HIHTFSFTFEEVATK

SEQ ID NO: 281423 - protein, 15 aa, Artificial Sequence
  Description of Artificial Sequence: Synthetic peptide
  Seed: HIHIFSFTGEEMATK
HIHTFSITFEEIATK

SEQ ID NO: 281424 - protein, 15 aa, Artificial Sequence
  Description of Artificial Sequence: Synthetic peptide
  Seed: HIHIFSFTGEEMATK
HIHTFSITFEELATK

SEQ ID NO: 281425 - protein, 15 aa, Artificial Sequence
  Description of Artificial Sequence: Synthetic peptide
  Seed: HIHIFSFTGEEMATK
HIHTFSITFEEVATK

SEQ ID NO: 281426 - protein, 15 aa, Artificial Sequence
  Description of Artificial Sequence: Synthetic peptide
  Seed: HIHIFSFTGEEMATK
HIHTFSLTFEELATK

SEQ ID NO: 281427 - protein, 15 aa, Artificial Sequence
  Description of Artificial Sequence: Synthetic peptide
  Seed: HIHIFSFTGEEMATK
HIHTFSTTFEELATK

SEQ ID NO: 281428 - protein, 15 aa, Artificial Sequence
  Description of Artificial Sequence: Synthetic peptide
  Seed: HIHIFSFTGEEMATK
HIHTFSVTFEEIATK

SEQ ID NO: 281429 - protein, 15 aa, Artificial Sequence
  Description of Artificial Sequence: Synthetic peptide
  Seed: HIHIFSFTGEEMATK
HIHTFSVTFEELATK

SEQ ID NO: 281430 - protein, 15 aa, Artificial Sequence
  Description of Artificial Sequence: Synthetic peptide
  Seed: HIHIFSFTGEEMATK
HIHVFSATFEEAATK

SEQ ID NO: 281431 - protein, 15 aa, Artificial Sequence
  Description of Artificial Sequence: Synthetic peptide
  Seed: HIHIFSFTGEEMATK
HIHVFSATFEEFATK

SEQ ID NO: 281432 - protein, 15 aa, Artificial Sequence
  Description of Artificial Sequence: Synthetic peptide
  Seed: HIHIFSFTGEEMATK
HIHVFSATFEEIATK

SEQ ID NO: 281433 - protein, 15 aa, Artificial Sequence
  Description of Artificial Sequence: Synthetic peptide
  Seed: HIHIFSFTGEEMATK
HIHVFSATFEELATK

SEQ ID NO: 281434 - protein, 15 aa, Artificial Sequence
  Description of Artificial Sequence: Synthetic peptide
  Seed: HIHIFSFTGEEMATK
HIHVFSATFEEMATK

SEQ ID NO: 281435 - protein, 15 aa, Artificial Sequence
  Description of Artificial Sequence: Synthetic peptide
  Seed: HIHIFSFTGEEMATK
HIHVFSATFEETATK

SEQ ID NO: 281436 - protein, 15 aa, Artificial Sequence
  Description of Artificial Sequence: Synthetic peptide
  Seed: HIHIFSFTGEEMATK
HIHVFSATFEEVATK

SEQ ID NO: 281437 - protein, 15 aa, Artificial Sequence
  Description of Artificial Sequence: Synthetic peptide
  Seed: HIHIFSFTGEEMATK
HIHVFSATFEEYATK

SEQ ID NO: 281438 - protein, 15 aa, Artificial Sequence
  Description of Artificial Sequence: Synthetic peptide
  Seed: HIHIFSFTGEEMATK
HIHVFSATWEEIATK

SEQ ID NO: 281439 - protein, 15 aa, Artificial Sequence
  Description of Artificial Sequence: Synthetic peptide
  Seed: HIHIFSFTGEEMATK
HIHVFSATWEELATK

SEQ ID NO: 281440 - protein, 15 aa, Artificial Sequence
  Description of Artificial Sequence: Synthetic peptide
  Seed: HIHIFSFTGEEMATK
HIHVFSATYEEIATK

SEQ ID NO: 281441 - protein, 15 aa, Artificial Sequence
  Description of Artificial Sequence: Synthetic peptide
  Seed: HIHIFSFTGEEMATK
HIHVFSATYEELATK

SEQ ID NO: 281442 - protein, 15 aa, Artificial Sequence
  Description of Artificial Sequence: Synthetic peptide
  Seed: HIHIFSFTGEEMATK
HIHVFSATYEEVATK

SEQ ID NO: 281443 - protein, 15 aa, Artificial Sequence
  Description of Artificial Sequence: Synthetic peptide
  Seed: HIHIFSFTGEEMATK
HIHVFSCTFEEIATK

SEQ ID NO: 281444 - protein, 15 aa, Artificial Sequence
  Description of Artificial Sequence: Synthetic peptide
  Seed: HIHIFSFTGEEMATK
HIHVFSCTFEELATK

SEQ ID NO: 281445 - protein, 15 aa, Artificial Sequence
  Description of Artificial Sequence: Synthetic peptide
  Seed: HIHIFSFTGEEMATK
HIHVFSCTFEEVATK

SEQ ID NO: 281446 - protein, 15 aa, Artificial Sequence
  Description of Artificial Sequence: Synthetic peptide
  Seed: HIHIFSFTGEEMATK
HIHVFSDTFEEIATK

SEQ ID NO: 281447 - protein, 15 aa, Artificial Sequence
  Description of Artificial Sequence: Synthetic peptide
  Seed: HIHIFSFTGEEMATK
HIHVFSDTFEELATK

SEQ ID NO: 281448 - protein, 15 aa, Artificial Sequence
  Description of Artificial Sequence: Synthetic peptide
  Seed: HIHIFSFTGEEMATK
HIHVFSETFEEFATK

SEQ ID NO: 281449 - protein, 15 aa, Artificial Sequence
  Description of Artificial Sequence: Synthetic peptide
  Seed: HIHIFSFTGEEMATK
HIHVFSETFEEIATK

SEQ ID NO: 281450 - protein, 15 aa, Artificial Sequence
  Description of Artificial Sequence: Synthetic peptide
  Seed: HIHIFSFTGEEMATK
HIHVFSETFEELATK

SEQ ID NO: 281451 - protein, 15 aa, Artificial Sequence
  Description of Artificial Sequence: Synthetic peptide
  Seed: HIHIFSFTGEEMATK
HIHVFSETFEEMATK

SEQ ID NO: 281452 - protein, 15 aa, Artificial Sequence
  Description of Artificial Sequence: Synthetic peptide
  Seed: HIHIFSFTGEEMATK
HIHVFSETFEEVATK

SEQ ID NO: 281453 - protein, 15 aa, Artificial Sequence
  Description of Artificial Sequence: Synthetic peptide
  Seed: HIHIFSFTGEEMATK
HIHVFSFTFEEAATK

SEQ ID NO: 281454 - protein, 15 aa, Artificial Sequence
  Description of Artificial Sequence: Synthetic peptide
  Seed: HIHIFSFTGEEMATK
HIHVFSFTFEEFATK

SEQ ID NO: 281455 - protein, 15 aa, Artificial Sequence
  Description of Artificial Sequence: Synthetic peptide
  Seed: HIHIFSFTGEEMATK
HIHVFSFTFEEHATK

SEQ ID NO: 281456 - protein, 15 aa, Artificial Sequence
  Description of Artificial Sequence: Synthetic peptide
  Seed: HIHIFSFTGEEMATK
HIHVFSFTFEEIATK

SEQ ID NO: 281457 - protein, 15 aa, Artificial Sequence
  Description of Artificial Sequence: Synthetic peptide
  Seed: HIHIFSFTGEEMATK
HIHVFSFTFEELATK

SEQ ID NO: 281458 - protein, 15 aa, Artificial Sequence
  Description of Artificial Sequence: Synthetic peptide
  Seed: HIHIFSFTGEEMATK
HIHVFSFTFEEMATK

SEQ ID NO: 281459 - protein, 15 aa, Artificial Sequence
  Description of Artificial Sequence: Synthetic peptide
  Seed: HIHIFSFTGEEMATK
HIHVFSFTFEENATK

SEQ ID NO: 281460 - protein, 15 aa, Artificial Sequence
  Description of Artificial Sequence: Synthetic peptide
  Seed: HIHIFSFTGEEMATK
HIHVFSFTFEERATK

SEQ ID NO: 281461 - protein, 15 aa, Artificial Sequence
  Description of Artificial Sequence: Synthetic peptide
  Seed: HIHIFSFTGEEMATK
HIHVFSFTFEESATK

SEQ ID NO: 281462 - protein, 15 aa, Artificial Sequence
  Description of Artificial Sequence: Synthetic peptide
  Seed: HIHIFSFTGEEMATK
HIHVFSFTFEETATK

SEQ ID NO: 281463 - protein, 15 aa, Artificial Sequence
  Description of Artificial Sequence: Synthetic peptide
  Seed: HIHIFSFTGEEMATK
HIHVFSFTFEEVATK

SEQ ID NO: 281464 - protein, 15 aa, Artificial Sequence
  Description of Artificial Sequence: Synthetic peptide
  Seed: HIHIFSFTGEEMATK
HIHVFSFTFEEYATK

SEQ ID NO: 281465 - protein, 15 aa, Artificial Sequence
  Description of Artificial Sequence: Synthetic peptide
  Seed: HIHIFSFTGEEMATK
HIHVFSFTIEEFATK

SEQ ID NO: 281466 - protein, 15 aa, Artificial Sequence
  Description of Artificial Sequence: Synthetic peptide
  Seed: HIHIFSFTGEEMATK
HIHVFSFTIEEIATK

SEQ ID NO: 281467 - protein, 15 aa, Artificial Sequence
  Description of Artificial Sequence: Synthetic peptide
  Seed: HIHIFSFTGEEMATK
HIHVFSFTIEELATK

SEQ ID NO: 281468 - protein, 15 aa, Artificial Sequence
  Description of Artificial Sequence: Synthetic peptide
  Seed: HIHIFSFTGEEMATK
HIHVFSFTIEEVATK

SEQ ID NO: 281469 - protein, 15 aa, Artificial Sequence
  Description of Artificial Sequence: Synthetic peptide
  Seed: HIHIFSFTGEEMATK
HIHVFSFTLEEFATK

SEQ ID NO: 281470 - protein, 15 aa, Artificial Sequence
  Description of Artificial Sequence: Synthetic peptide
  Seed: HIHIFSFTGEEMATK
HIHVFSFTLEEIATK

SEQ ID NO: 281471 - protein, 15 aa, Artificial Sequence
  Description of Artificial Sequence: Synthetic peptide
  Seed: HIHIFSFTGEEMATK
HIHVFSFTLEELATK

SEQ ID NO: 281472 - protein, 15 aa, Artificial Sequence
  Description of Artificial Sequence: Synthetic peptide
  Seed: HIHIFSFTGEEMATK
HIHVFSFTLEEMATK

SEQ ID NO: 281473 - protein, 15 aa, Artificial Sequence
  Description of Artificial Sequence: Synthetic peptide
  Seed: HIHIFSFTGEEMATK
HIHVFSFTLEEVATK

SEQ ID NO: 281474 - protein, 15 aa, Artificial Sequence
  Description of Artificial Sequence: Synthetic peptide
  Seed: HIHIFSFTGEEMATK
HIHVFSFTLEEYATK

SEQ ID NO: 281475 - protein, 15 aa, Artificial Sequence
  Description of Artificial Sequence: Synthetic peptide
  Seed: HIHIFSFTGEEMATK
HIHVFSFTMEEFATK

SEQ ID NO: 281476 - protein, 15 aa, Artificial Sequence
  Description of Artificial Sequence: Synthetic peptide
  Seed: HIHIFSFTGEEMATK
HIHVFSFTMEEIATK

SEQ ID NO: 281477 - protein, 15 aa, Artificial Sequence
  Description of Artificial Sequence: Synthetic peptide
  Seed: HIHIFSFTGEEMATK
HIHVFSFTMEELATK

SEQ ID NO: 281478 - protein, 15 aa, Artificial Sequence
  Description of Artificial Sequence: Synthetic peptide
  Seed: HIHIFSFTGEEMATK
HIHVFSFTMEEVATK

SEQ ID NO: 281479 - protein, 15 aa, Artificial Sequence
  Description of Artificial Sequence: Synthetic peptide
  Seed: HIHIFSFTGEEMATK
HIHVFSFTWEEFATK

SEQ ID NO: 281480 - protein, 15 aa, Artificial Sequence
  Description of Artificial Sequence: Synthetic peptide
  Seed: HIHIFSFTGEEMATK
HIHVFSFTWEEIATK

SEQ ID NO: 281481 - protein, 15 aa, Artificial Sequence
  Description of Artificial Sequence: Synthetic peptide
  Seed: HIHIFSFTGEEMATK
HIHVFSFTWEELATK

SEQ ID NO: 281482 - protein, 15 aa, Artificial Sequence
  Description of Artificial Sequence: Synthetic peptide
  Seed: HIHIFSFTGEEMATK
HIHVFSFTWEEMATK

SEQ ID NO: 281483 - protein, 15 aa, Artificial Sequence
  Description of Artificial Sequence: Synthetic peptide
  Seed: HIHIFSFTGEEMATK
HIHVFSFTWEEVATK

SEQ ID NO: 281484 - protein, 15 aa, Artificial Sequence
  Description of Artificial Sequence: Synthetic peptide
  Seed: HIHIFSFTGEEMATK
HIHVFSFTYEEFATK

SEQ ID NO: 281485 - protein, 15 aa, Artificial Sequence
  Description of Artificial Sequence: Synthetic peptide
  Seed: HIHIFSFTGEEMATK
HIHVFSFTYEEIATK

SEQ ID NO: 281486 - protein, 15 aa, Artificial Sequence
  Description of Artificial Sequence: Synthetic peptide
  Seed: HIHIFSFTGEEMATK
HIHVFSFTYEELATK

SEQ ID NO: 281487 - protein, 15 aa, Artificial Sequence
  Description of Artificial Sequence: Synthetic peptide
  Seed: HIHIFSFTGEEMATK
HIHVFSFTYEEMATK

SEQ ID NO: 281488 - protein, 15 aa, Artificial Sequence
  Description of Artificial Sequence: Synthetic peptide
  Seed: HIHIFSFTGEEMATK
HIHVFSFTYEEVATK

SEQ ID NO: 281489 - protein, 15 aa, Artificial Sequence
  Description of Artificial Sequence: Synthetic peptide
  Seed: HIHIFSFTGEEMATK
HIHVFSFTYEEYATK

SEQ ID NO: 281490 - protein, 15 aa, Artificial Sequence
  Description of Artificial Sequence: Synthetic peptide
  Seed: HIHIFSFTGEEMATK
HIHVFSHTFEEAATK

SEQ ID NO: 281491 - protein, 15 aa, Artificial Sequence
  Description of Artificial Sequence: Synthetic peptide
  Seed: HIHIFSFTGEEMATK
HIHVFSHTFEEFATK

SEQ ID NO: 281492 - protein, 15 aa, Artificial Sequence
  Description of Artificial Sequence: Synthetic peptide
  Seed: HIHIFSFTGEEMATK
HIHVFSHTFEEIATK

SEQ ID NO: 281493 - protein, 15 aa, Artificial Sequence
  Description of Artificial Sequence: Synthetic peptide
  Seed: HIHIFSFTGEEMATK
HIHVFSHTFEELATK

SEQ ID NO: 281494 - protein, 15 aa, Artificial Sequence
  Description of Artificial Sequence: Synthetic peptide
  Seed: HIHIFSFTGEEMATK
HIHVFSHTFEEMATK

SEQ ID NO: 281495 - protein, 15 aa, Artificial Sequence
  Description of Artificial Sequence: Synthetic peptide
  Seed: HIHIFSFTGEEMATK
HIHVFSHTFEESATK

SEQ ID NO: 281496 - protein, 15 aa, Artificial Sequence
  Description of Artificial Sequence: Synthetic peptide
  Seed: HIHIFSFTGEEMATK
HIHVFSHTFEETATK

SEQ ID NO: 281497 - protein, 15 aa, Artificial Sequence
  Description of Artificial Sequence: Synthetic peptide
  Seed: HIHIFSFTGEEMATK
HIHVFSHTFEEVATK

SEQ ID NO: 281498 - protein, 15 aa, Artificial Sequence
  Description of Artificial Sequence: Synthetic peptide
  Seed: HIHIFSFTGEEMATK
HIHVFSHTFEEYATK

SEQ ID NO: 281499 - protein, 15 aa, Artificial Sequence
  Description of Artificial Sequence: Synthetic peptide
  Seed: HIHIFSFTGEEMATK
HIHVFSHTLEEIATK

SEQ ID NO: 281500 - protein, 15 aa, Artificial Sequence
  Description of Artificial Sequence: Synthetic peptide
  Seed: HIHIFSFTGEEMATK
HIHVFSHTLEELATK

SEQ ID NO: 281501 - protein, 15 aa, Artificial Sequence
  Description of Artificial Sequence: Synthetic peptide
  Seed: HIHIFSFTGEEMATK
HIHVFSHTWEEIATK

SEQ ID NO: 281502 - protein, 15 aa, Artificial Sequence
  Description of Artificial Sequence: Synthetic peptide
  Seed: HIHIFSFTGEEMATK
HIHVFSHTWEELATK

SEQ ID NO: 281503 - protein, 15 aa, Artificial Sequence
  Description of Artificial Sequence: Synthetic peptide
  Seed: HIHIFSFTGEEMATK
HIHVFSHTYEEIATK

SEQ ID NO: 281504 - protein, 15 aa, Artificial Sequence
  Description of Artificial Sequence: Synthetic peptide
  Seed: HIHIFSFTGEEMATK
HIHVFSHTYEELATK

SEQ ID NO: 281505 - protein, 15 aa, Artificial Sequence
  Description of Artificial Sequence: Synthetic peptide
  Seed: HIHIFSFTGEEMATK
HIHVFSITAEELATK

SEQ ID NO: 281506 - protein, 15 aa, Artificial Sequence
  Description of Artificial Sequence: Synthetic peptide
  Seed: HIHIFSFTGEEMATK
HIHVFSITAEEVATK

SEQ ID NO: 281507 - protein, 15 aa, Artificial Sequence
  Description of Artificial Sequence: Synthetic peptide
  Seed: HIHIFSFTGEEMATK
HIHVFSITFEEAATK

SEQ ID NO: 281508 - protein, 15 aa, Artificial Sequence
  Description of Artificial Sequence: Synthetic peptide
  Seed: HIHIFSFTGEEMATK
HIHVFSITFEEEATK

SEQ ID NO: 281509 - protein, 15 aa, Artificial Sequence
  Description of Artificial Sequence: Synthetic peptide
  Seed: HIHIFSFTGEEMATK
HIHVFSITFEEFATK

SEQ ID NO: 281510 - protein, 15 aa, Artificial Sequence
  Description of Artificial Sequence: Synthetic peptide
  Seed: HIHIFSFTGEEMATK
HIHVFSITFEEHATK

SEQ ID NO: 281511 - protein, 15 aa, Artificial Sequence
  Description of Artificial Sequence: Synthetic peptide
  Seed: HIHIFSFTGEEMATK
HIHVFSITFEEIATK

SEQ ID NO: 281512 - protein, 15 aa, Artificial Sequence
  Description of Artificial Sequence: Synthetic peptide
  Seed: HIHIFSFTGEEMATK
HIHVFSITFEELATK

SEQ ID NO: 281513 - protein, 15 aa, Artificial Sequence
  Description of Artificial Sequence: Synthetic peptide
  Seed: HIHIFSFTGEEMATK
HIHVFSITFEEMATK

SEQ ID NO: 281514 - protein, 15 aa, Artificial Sequence
  Description of Artificial Sequence: Synthetic peptide
  Seed: HIHIFSFTGEEMATK
HIHVFSITFEENATK

SEQ ID NO: 281515 - protein, 15 aa, Artificial Sequence
  Description of Artificial Sequence: Synthetic peptide
  Seed: HIHIFSFTGEEMATK
HIHVFSITFEESATK

SEQ ID NO: 281516 - protein, 15 aa, Artificial Sequence
  Description of Artificial Sequence: Synthetic peptide
  Seed: HIHIFSFTGEEMATK
HIHVFSITFEETATK

SEQ ID NO: 281517 - protein, 15 aa, Artificial Sequence
  Description of Artificial Sequence: Synthetic peptide
  Seed: HIHIFSFTGEEMATK
HIHVFSITFEEVATK

SEQ ID NO: 281518 - protein, 15 aa, Artificial Sequence
  Description of Artificial Sequence: Synthetic peptide
  Seed: HIHIFSFTGEEMATK
HIHVFSITFEEYATK

SEQ ID NO: 281519 - protein, 15 aa, Artificial Sequence
  Description of Artificial Sequence: Synthetic peptide
  Seed: HIHIFSFTGEEMATK
HIHVFSITGEELATK

SEQ ID NO: 281520 - protein, 15 aa, Artificial Sequence
  Description of Artificial Sequence: Synthetic peptide
  Seed: HIHIFSFTGEEMATK
HIHVFSITLEEIATK

SEQ ID NO: 281521 - protein, 15 aa, Artificial Sequence
  Description of Artificial Sequence: Synthetic peptide
  Seed: HIHIFSFTGEEMATK
HIHVFSITLEELATK

SEQ ID NO: 281522 - protein, 15 aa, Artificial Sequence
  Description of Artificial Sequence: Synthetic peptide
  Seed: HIHIFSFTGEEMATK
HIHVFSITLEEVATK

SEQ ID NO: 281523 - protein, 15 aa, Artificial Sequence
  Description of Artificial Sequence: Synthetic peptide
  Seed: HIHIFSFTGEEMATK
HIHVFSITWEEFATK

SEQ ID NO: 281524 - protein, 15 aa, Artificial Sequence
  Description of Artificial Sequence: Synthetic peptide
  Seed: HIHIFSFTGEEMATK
HIHVFSITWEEIATK

SEQ ID NO: 281525 - protein, 15 aa, Artificial Sequence
  Description of Artificial Sequence: Synthetic peptide
  Seed: HIHIFSFTGEEMATK
HIHVFSITWEELATK

SEQ ID NO: 281526 - protein, 15 aa, Artificial Sequence
  Description of Artificial Sequence: Synthetic peptide
  Seed: HIHIFSFTGEEMATK
HIHVFSITWEEMATK

SEQ ID NO: 281527 - protein, 15 aa, Artificial Sequence
  Description of Artificial Sequence: Synthetic peptide
  Seed: HIHIFSFTGEEMATK
HIHVFSITWEEVATK

SEQ ID NO: 281528 - protein, 15 aa, Artificial Sequence
  Description of Artificial Sequence: Synthetic peptide
  Seed: HIHIFSFTGEEMATK
HIHVFSITYEEFATK

SEQ ID NO: 281529 - protein, 15 aa, Artificial Sequence
  Description of Artificial Sequence: Synthetic peptide
  Seed: HIHIFSFTGEEMATK
HIHVFSITYEEIATK

SEQ ID NO: 281530 - protein, 15 aa, Artificial Sequence
  Description of Artificial Sequence: Synthetic peptide
  Seed: HIHIFSFTGEEMATK
HIHVFSITYEELATK

SEQ ID NO: 281531 - protein, 15 aa, Artificial Sequence
  Description of Artificial Sequence: Synthetic peptide
  Seed: HIHIFSFTGEEMATK
HIHVFSITYEEMATK

SEQ ID NO: 281532 - protein, 15 aa, Artificial Sequence
  Description of Artificial Sequence: Synthetic peptide
  Seed: HIHIFSFTGEEMATK
HIHVFSITYEEVATK

SEQ ID NO: 281533 - protein, 15 aa, Artificial Sequence
  Description of Artificial Sequence: Synthetic peptide
  Seed: HIHIFSFTGEEMATK
HIHVFSITYEEYATK

SEQ ID NO: 281534 - protein, 15 aa, Artificial Sequence
  Description of Artificial Sequence: Synthetic peptide
  Seed: HIHIFSFTGEEMATK
HIHVFSKTFEEFATK

SEQ ID NO: 281535 - protein, 15 aa, Artificial Sequence
  Description of Artificial Sequence: Synthetic peptide
  Seed: HIHIFSFTGEEMATK
HIHVFSKTFEEIATK

SEQ ID NO: 281536 - protein, 15 aa, Artificial Sequence
  Description of Artificial Sequence: Synthetic peptide
  Seed: HIHIFSFTGEEMATK
HIHVFSKTFEELATK

SEQ ID NO: 281537 - protein, 15 aa, Artificial Sequence
  Description of Artificial Sequence: Synthetic peptide
  Seed: HIHIFSFTGEEMATK
HIHVFSKTFEEMATK

SEQ ID NO: 281538 - protein, 15 aa, Artificial Sequence
  Description of Artificial Sequence: Synthetic peptide
  Seed: HIHIFSFTGEEMATK
HIHVFSKTFEEVATK

SEQ ID NO: 281539 - protein, 15 aa, Artificial Sequence
  Description of Artificial Sequence: Synthetic peptide
  Seed: HIHIFSFTGEEMATK
HIHVFSLTAEEAATK

SEQ ID NO: 281540 - protein, 15 aa, Artificial Sequence
  Description of Artificial Sequence: Synthetic peptide
  Seed: HIHIFSFTGEEMATK
HIHVFSLTAEEIATK

SEQ ID NO: 281541 - protein, 15 aa, Artificial Sequence
  Description of Artificial Sequence: Synthetic peptide
  Seed: HIHIFSFTGEEMATK
HIHVFSLTAEELATK

SEQ ID NO: 281542 - protein, 15 aa, Artificial Sequence
  Description of Artificial Sequence: Synthetic peptide
  Seed: HIHIFSFTGEEMATK
HIHVFSLTAEEMATK

SEQ ID NO: 281543 - protein, 15 aa, Artificial Sequence
  Description of Artificial Sequence: Synthetic peptide
  Seed: HIHIFSFTGEEMATK
HIHVFSLTAEETATK

SEQ ID NO: 281544 - protein, 15 aa, Artificial Sequence
  Description of Artificial Sequence: Synthetic peptide
  Seed: HIHIFSFTGEEMATK
HIHVFSLTAEEVATK

SEQ ID NO: 281545 - protein, 15 aa, Artificial Sequence
  Description of Artificial Sequence: Synthetic peptide
  Seed: HIHIFSFTGEEMATK
HIHVFSLTFEEAATK

SEQ ID NO: 281546 - protein, 15 aa, Artificial Sequence
  Description of Artificial Sequence: Synthetic peptide
  Seed: HIHIFSFTGEEMATK
HIHVFSLTFEEDATK

SEQ ID NO: 281547 - protein, 15 aa, Artificial Sequence
  Description of Artificial Sequence: Synthetic peptide
  Seed: HIHIFSFTGEEMATK
HIHVFSLTFEEEATK

SEQ ID NO: 281548 - protein, 15 aa, Artificial Sequence
  Description of Artificial Sequence: Synthetic peptide
  Seed: HIHIFSFTGEEMATK
HIHVFSLTFEEFATK

SEQ ID NO: 281549 - protein, 15 aa, Artificial Sequence
  Description of Artificial Sequence: Synthetic peptide
  Seed: HIHIFSFTGEEMATK
HIHVFSLTFEEHATK

SEQ ID NO: 281550 - protein, 15 aa, Artificial Sequence
  Description of Artificial Sequence: Synthetic peptide
  Seed: HIHIFSFTGEEMATK
HIHVFSLTFEEIATK

SEQ ID NO: 281551 - protein, 15 aa, Artificial Sequence
  Description of Artificial Sequence: Synthetic peptide
  Seed: HIHIFSFTGEEMATK
HIHVFSLTFEELATK

SEQ ID NO: 281552 - protein, 15 aa, Artificial Sequence
  Description of Artificial Sequence: Synthetic peptide
  Seed: HIHIFSFTGEEMATK
HIHVFSLTFEEMATK

SEQ ID NO: 281553 - protein, 15 aa, Artificial Sequence
  Description of Artificial Sequence: Synthetic peptide
  Seed: HIHIFSFTGEEMATK
HIHVFSLTFEENATK

SEQ ID NO: 281554 - protein, 15 aa, Artificial Sequence
  Description of Artificial Sequence: Synthetic peptide
  Seed: HIHIFSFTGEEMATK
HIHVFSLTFEERATK

SEQ ID NO: 281555 - protein, 15 aa, Artificial Sequence
  Description of Artificial Sequence: Synthetic peptide
  Seed: HIHIFSFTGEEMATK
HIHVFSLTFEESATK

SEQ ID NO: 281556 - protein, 15 aa, Artificial Sequence
  Description of Artificial Sequence: Synthetic peptide
  Seed: HIHIFSFTGEEMATK
HIHVFSLTFEETATK

SEQ ID NO: 281557 - protein, 15 aa, Artificial Sequence
  Description of Artificial Sequence: Synthetic peptide
  Seed: HIHIFSFTGEEMATK
HIHVFSLTFEEVATK

SEQ ID NO: 281558 - protein, 15 aa, Artificial Sequence
  Description of Artificial Sequence: Synthetic peptide
  Seed: HIHIFSFTGEEMATK
HIHVFSLTFEEYATK

SEQ ID NO: 281559 - protein, 15 aa, Artificial Sequence
  Description of Artificial Sequence: Synthetic peptide
  Seed: HIHIFSFTGEEMATK
HIHVFSLTGEEAATK

SEQ ID NO: 281560 - protein, 15 aa, Artificial Sequence
  Description of Artificial Sequence: Synthetic peptide
  Seed: HIHIFSFTGEEMATK
HIHVFSLTGEEIATK

SEQ ID NO: 281561 - protein, 15 aa, Artificial Sequence
  Description of Artificial Sequence: Synthetic peptide
  Seed: HIHIFSFTGEEMATK
HIHVFSLTGEELATK

SEQ ID NO: 281562 - protein, 15 aa, Artificial Sequence
  Description of Artificial Sequence: Synthetic peptide
  Seed: HIHIFSFTGEEMATK
HIHVFSLTGEEMATK

SEQ ID NO: 281563 - protein, 15 aa, Artificial Sequence
  Description of Artificial Sequence: Synthetic peptide
  Seed: HIHIFSFTGEEMATK
HIHVFSLTGEETATK

SEQ ID NO: 281564 - protein, 15 aa, Artificial Sequence
  Description of Artificial Sequence: Synthetic peptide
  Seed: HIHIFSFTGEEMATK
HIHVFSLTGEEVATK

SEQ ID NO: 281565 - protein, 15 aa, Artificial Sequence
  Description of Artificial Sequence: Synthetic peptide
  Seed: HIHIFSFTGEEMATK
HIHVFSLTLEEFATK

SEQ ID NO: 281566 - protein, 15 aa, Artificial Sequence
  Description of Artificial Sequence: Synthetic peptide
  Seed: HIHIFSFTGEEMATK
HIHVFSLTLEELATK

SEQ ID NO: 281567 - protein, 15 aa, Artificial Sequence
  Description of Artificial Sequence: Synthetic peptide
  Seed: HIHIFSFTGEEMATK
HIHVFSLTPEELATK

SEQ ID NO: 281568 - protein, 15 aa, Artificial Sequence
  Description of Artificial Sequence: Synthetic peptide
  Seed: HIHIFSFTGEEMATK
HIHVFSLTSEEAATK

SEQ ID NO: 281569 - protein, 15 aa, Artificial Sequence
  Description of Artificial Sequence: Synthetic peptide
  Seed: HIHIFSFTGEEMATK
HIHVFSLTSEEIATK

SEQ ID NO: 281570 - protein, 15 aa, Artificial Sequence
  Description of Artificial Sequence: Synthetic peptide
  Seed: HIHIFSFTGEEMATK
HIHVFSLTSEELATK

SEQ ID NO: 281571 - protein, 15 aa, Artificial Sequence
  Description of Artificial Sequence: Synthetic peptide
  Seed: HIHIFSFTGEEMATK
HIHVFSLTSEEVATK

SEQ ID NO: 281572 - protein, 15 aa, Artificial Sequence
  Description of Artificial Sequence: Synthetic peptide
  Seed: HIHIFSFTGEEMATK
HIHVFSLTWEEFATK

SEQ ID NO: 281573 - protein, 15 aa, Artificial Sequence
  Description of Artificial Sequence: Synthetic peptide
  Seed: HIHIFSFTGEEMATK
HIHVFSLTWEEIATK

SEQ ID NO: 281574 - protein, 15 aa, Artificial Sequence
  Description of Artificial Sequence: Synthetic peptide
  Seed: HIHIFSFTGEEMATK
HIHVFSLTWEELATK

SEQ ID NO: 281575 - protein, 15 aa, Artificial Sequence
  Description of Artificial Sequence: Synthetic peptide
  Seed: HIHIFSFTGEEMATK
HIHVFSLTWEEVATK

SEQ ID NO: 281576 - protein, 15 aa, Artificial Sequence
  Description of Artificial Sequence: Synthetic peptide
  Seed: HIHIFSFTGEEMATK
HIHVFSLTYEEFATK

SEQ ID NO: 281577 - protein, 15 aa, Artificial Sequence
  Description of Artificial Sequence: Synthetic peptide
  Seed: HIHIFSFTGEEMATK
HIHVFSLTYEEIATK

SEQ ID NO: 281578 - protein, 15 aa, Artificial Sequence
  Description of Artificial Sequence: Synthetic peptide
  Seed: HIHIFSFTGEEMATK
HIHVFSLTYEELATK

SEQ ID NO: 281579 - protein, 15 aa, Artificial Sequence
  Description of Artificial Sequence: Synthetic peptide
  Seed: HIHIFSFTGEEMATK
HIHVFSLTYEEMATK

SEQ ID NO: 281580 - protein, 15 aa, Artificial Sequence
  Description of Artificial Sequence: Synthetic peptide
  Seed: HIHIFSFTGEEMATK
HIHVFSLTYEEVATK

SEQ ID NO: 281581 - protein, 15 aa, Artificial Sequence
  Description of Artificial Sequence: Synthetic peptide
  Seed: HIHIFSFTGEEMATK
HIHVFSLTYEEYATK

SEQ ID NO: 281582 - protein, 15 aa, Artificial Sequence
  Description of Artificial Sequence: Synthetic peptide
  Seed: HIHIFSFTGEEMATK
HIHVFSMTAEEAATK

SEQ ID NO: 281583 - protein, 15 aa, Artificial Sequence
  Description of Artificial Sequence: Synthetic peptide
  Seed: HIHIFSFTGEEMATK
HIHVFSMTAEEIATK

SEQ ID NO: 281584 - protein, 15 aa, Artificial Sequence
  Description of Artificial Sequence: Synthetic peptide
  Seed: HIHIFSFTGEEMATK
HIHVFSMTAEELATK

SEQ ID NO: 281585 - protein, 15 aa, Artificial Sequence
  Description of Artificial Sequence: Synthetic peptide
  Seed: HIHIFSFTGEEMATK
HIHVFSMTAEEMATK

SEQ ID NO: 281586 - protein, 15 aa, Artificial Sequence
  Description of Artificial Sequence: Synthetic peptide
  Seed: HIHIFSFTGEEMATK
HIHVFSMTAEEVATK

SEQ ID NO: 281587 - protein, 15 aa, Artificial Sequence
  Description of Artificial Sequence: Synthetic peptide
  Seed: HIHIFSFTGEEMATK
HIHVFSMTFEEAATK

SEQ ID NO: 281588 - protein, 15 aa, Artificial Sequence
  Description of Artificial Sequence: Synthetic peptide
  Seed: HIHIFSFTGEEMATK
HIHVFSMTFEEFATK

SEQ ID NO: 281589 - protein, 15 aa, Artificial Sequence
  Description of Artificial Sequence: Synthetic peptide
  Seed: HIHIFSFTGEEMATK
HIHVFSMTFEEIATK

SEQ ID NO: 281590 - protein, 15 aa, Artificial Sequence
  Description of Artificial Sequence: Synthetic peptide
  Seed: HIHIFSFTGEEMATK
HIHVFSMTFEELATK

SEQ ID NO: 281591 - protein, 15 aa, Artificial Sequence
  Description of Artificial Sequence: Synthetic peptide
  Seed: HIHIFSFTGEEMATK
HIHVFSMTFEEMATK

SEQ ID NO: 281592 - protein, 15 aa, Artificial Sequence
  Description of Artificial Sequence: Synthetic peptide
  Seed: HIHIFSFTGEEMATK
HIHVFSMTFEESATK

SEQ ID NO: 281593 - protein, 15 aa, Artificial Sequence
  Description of Artificial Sequence: Synthetic peptide
  Seed: HIHIFSFTGEEMATK
HIHVFSMTFEETATK

SEQ ID NO: 281594 - protein, 15 aa, Artificial Sequence
  Description of Artificial Sequence: Synthetic peptide
  Seed: HIHIFSFTGEEMATK
HIHVFSMTFEEVATK

SEQ ID NO: 281595 - protein, 15 aa, Artificial Sequence
  Description of Artificial Sequence: Synthetic peptide
  Seed: HIHIFSFTGEEMATK
HIHVFSMTFEEYATK

SEQ ID NO: 281596 - protein, 15 aa, Artificial Sequence
  Description of Artificial Sequence: Synthetic peptide
  Seed: HIHIFSFTGEEMATK
HIHVFSMTGEEAATK

SEQ ID NO: 281597 - protein, 15 aa, Artificial Sequence
  Description of Artificial Sequence: Synthetic peptide
  Seed: HIHIFSFTGEEMATK
HIHVFSMTGEEIATK

SEQ ID NO: 281598 - protein, 15 aa, Artificial Sequence
  Description of Artificial Sequence: Synthetic peptide
  Seed: HIHIFSFTGEEMATK
HIHVFSMTGEELATK

SEQ ID NO: 281599 - protein, 15 aa, Artificial Sequence
  Description of Artificial Sequence: Synthetic peptide
  Seed: HIHIFSFTGEEMATK
HIHVFSMTGEEMATK

SEQ ID NO: 281600 - protein, 15 aa, Artificial Sequence
  Description of Artificial Sequence: Synthetic peptide
  Seed: HIHIFSFTGEEMATK
HIHVFSMTGEEVATK

SEQ ID NO: 281601 - protein, 15 aa, Artificial Sequence
  Description of Artificial Sequence: Synthetic peptide
  Seed: HIHIFSFTGEEMATK
HIHVFSMTSEEAATK

SEQ ID NO: 281602 - protein, 15 aa, Artificial Sequence
  Description of Artificial Sequence: Synthetic peptide
  Seed: HIHIFSFTGEEMATK
HIHVFSMTSEEIATK

SEQ ID NO: 281603 - protein, 15 aa, Artificial Sequence
  Description of Artificial Sequence: Synthetic peptide
  Seed: HIHIFSFTGEEMATK
HIHVFSMTSEELATK

SEQ ID NO: 281604 - protein, 15 aa, Artificial Sequence
  Description of Artificial Sequence: Synthetic peptide
  Seed: HIHIFSFTGEEMATK
HIHVFSMTSEEVATK

SEQ ID NO: 281605 - protein, 15 aa, Artificial Sequence
  Description of Artificial Sequence: Synthetic peptide
  Seed: HIHIFSFTGEEMATK
HIHVFSMTWEEFATK

SEQ ID NO: 281606 - protein, 15 aa, Artificial Sequence
  Description of Artificial Sequence: Synthetic peptide
  Seed: HIHIFSFTGEEMATK
HIHVFSMTWEELATK

SEQ ID NO: 281607 - protein, 15 aa, Artificial Sequence
  Description of Artificial Sequence: Synthetic peptide
  Seed: HIHIFSFTGEEMATK
HIHVFSMTYEEFATK

SEQ ID NO: 281608 - protein, 15 aa, Artificial Sequence
  Description of Artificial Sequence: Synthetic peptide
  Seed: HIHIFSFTGEEMATK
HIHVFSMTYEEIATK

SEQ ID NO: 281609 - protein, 15 aa, Artificial Sequence
  Description of Artificial Sequence: Synthetic peptide
  Seed: HIHIFSFTGEEMATK
HIHVFSMTYEELATK

SEQ ID NO: 281610 - protein, 15 aa, Artificial Sequence
  Description of Artificial Sequence: Synthetic peptide
  Seed: HIHIFSFTGEEMATK
HIHVFSMTYEEVATK

SEQ ID NO: 281611 - protein, 15 aa, Artificial Sequence
  Description of Artificial Sequence: Synthetic peptide
  Seed: HIHIFSFTGEEMATK
HIHVFSNTFEEFATK

SEQ ID NO: 281612 - protein, 15 aa, Artificial Sequence
  Description of Artificial Sequence: Synthetic peptide
  Seed: HIHIFSFTGEEMATK
HIHVFSNTFEEIATK

SEQ ID NO: 281613 - protein, 15 aa, Artificial Sequence
  Description of Artificial Sequence: Synthetic peptide
  Seed: HIHIFSFTGEEMATK
HIHVFSNTFEELATK

SEQ ID NO: 281614 - protein, 15 aa, Artificial Sequence
  Description of Artificial Sequence: Synthetic peptide
  Seed: HIHIFSFTGEEMATK
HIHVFSNTFEEMATK

SEQ ID NO: 281615 - protein, 15 aa, Artificial Sequence
  Description of Artificial Sequence: Synthetic peptide
  Seed: HIHIFSFTGEEMATK
HIHVFSNTFEEVATK

SEQ ID NO: 281616 - protein, 15 aa, Artificial Sequence
  Description of Artificial Sequence: Synthetic peptide
  Seed: HIHIFSFTGEEMATK
HIHVFSQTFEEFATK

SEQ ID NO: 281617 - protein, 15 aa, Artificial Sequence
  Description of Artificial Sequence: Synthetic peptide
  Seed: HIHIFSFTGEEMATK
HIHVFSQTFEEIATK

SEQ ID NO: 281618 - protein, 15 aa, Artificial Sequence
  Description of Artificial Sequence: Synthetic peptide
  Seed: HIHIFSFTGEEMATK
HIHVFSQTFEELATK

SEQ ID NO: 281619 - protein, 15 aa, Artificial Sequence
  Description of Artificial Sequence: Synthetic peptide
  Seed: HIHIFSFTGEEMATK
HIHVFSQTFEEMATK

SEQ ID NO: 281620 - protein, 15 aa, Artificial Sequence
  Description of Artificial Sequence: Synthetic peptide
  Seed: HIHIFSFTGEEMATK
HIHVFSQTFEEVATK

SEQ ID NO: 281621 - protein, 15 aa, Artificial Sequence
  Description of Artificial Sequence: Synthetic peptide
  Seed: HIHIFSFTGEEMATK
HIHVFSQTFEEYATK

SEQ ID NO: 281622 - protein, 15 aa, Artificial Sequence
  Description of Artificial Sequence: Synthetic peptide
  Seed: HIHIFSFTGEEMATK
HIHVFSRTFEEIATK

SEQ ID NO: 281623 - protein, 15 aa, Artificial Sequence
  Description of Artificial Sequence: Synthetic peptide
  Seed: HIHIFSFTGEEMATK
HIHVFSRTFEELATK

SEQ ID NO: 281624 - protein, 15 aa, Artificial Sequence
  Description of Artificial Sequence: Synthetic peptide
  Seed: HIHIFSFTGEEMATK
HIHVFSRTFEEVATK

SEQ ID NO: 281625 - protein, 15 aa, Artificial Sequence
  Description of Artificial Sequence: Synthetic peptide
  Seed: HIHIFSFTGEEMATK
HIHVFSSTFEEAATK

SEQ ID NO: 281626 - protein, 15 aa, Artificial Sequence
  Description of Artificial Sequence: Synthetic peptide
  Seed: HIHIFSFTGEEMATK
HIHVFSSTFEEFATK

SEQ ID NO: 281627 - protein, 15 aa, Artificial Sequence
  Description of Artificial Sequence: Synthetic peptide
  Seed: HIHIFSFTGEEMATK
HIHVFSSTFEEIATK

SEQ ID NO: 281628 - protein, 15 aa, Artificial Sequence
  Description of Artificial Sequence: Synthetic peptide
  Seed: HIHIFSFTGEEMATK
HIHVFSSTFEELATK

SEQ ID NO: 281629 - protein, 15 aa, Artificial Sequence
  Description of Artificial Sequence: Synthetic peptide
  Seed: HIHIFSFTGEEMATK
HIHVFSSTFEEMATK

SEQ ID NO: 281630 - protein, 15 aa, Artificial Sequence
  Description of Artificial Sequence: Synthetic peptide
  Seed: HIHIFSFTGEEMATK
HIHVFSSTFEESATK

SEQ ID NO: 281631 - protein, 15 aa, Artificial Sequence
  Description of Artificial Sequence: Synthetic peptide
  Seed: HIHIFSFTGEEMATK
HIHVFSSTFEETATK

SEQ ID NO: 281632 - protein, 15 aa, Artificial Sequence
  Description of Artificial Sequence: Synthetic peptide
  Seed: HIHIFSFTGEEMATK
HIHVFSSTFEEVATK

SEQ ID NO: 281633 - protein, 15 aa, Artificial Sequence
  Description of Artificial Sequence: Synthetic peptide
  Seed: HIHIFSFTGEEMATK
HIHVFSSTFEEYATK

SEQ ID NO: 281634 - protein, 15 aa, Artificial Sequence
  Description of Artificial Sequence: Synthetic peptide
  Seed: HIHIFSFTGEEMATK
HIHVFSSTLEELATK

SEQ ID NO: 281635 - protein, 15 aa, Artificial Sequence
  Description of Artificial Sequence: Synthetic peptide
  Seed: HIHIFSFTGEEMATK
HIHVFSSTWEEIATK

SEQ ID NO: 281636 - protein, 15 aa, Artificial Sequence
  Description of Artificial Sequence: Synthetic peptide
  Seed: HIHIFSFTGEEMATK
HIHVFSSTWEELATK

SEQ ID NO: 281637 - protein, 15 aa, Artificial Sequence
  Description of Artificial Sequence: Synthetic peptide
  Seed: HIHIFSFTGEEMATK
HIHVFSSTYEEIATK

SEQ ID NO: 281638 - protein, 15 aa, Artificial Sequence
  Description of Artificial Sequence: Synthetic peptide
  Seed: HIHIFSFTGEEMATK
HIHVFSSTYEELATK

SEQ ID NO: 281639 - protein, 15 aa, Artificial Sequence
  Description of Artificial Sequence: Synthetic peptide
  Seed: HIHIFSFTGEEMATK
HIHVFSSTYEEVATK

SEQ ID NO: 281640 - protein, 15 aa, Artificial Sequence
  Description of Artificial Sequence: Synthetic peptide
  Seed: HIHIFSFTGEEMATK
HIHVFSTTFEEAATK

SEQ ID NO: 281641 - protein, 15 aa, Artificial Sequence
  Description of Artificial Sequence: Synthetic peptide
  Seed: HIHIFSFTGEEMATK
HIHVFSTTFEEEATK

SEQ ID NO: 281642 - protein, 15 aa, Artificial Sequence
  Description of Artificial Sequence: Synthetic peptide
  Seed: HIHIFSFTGEEMATK
HIHVFSTTFEEFATK

SEQ ID NO: 281643 - protein, 15 aa, Artificial Sequence
  Description of Artificial Sequence: Synthetic peptide
  Seed: HIHIFSFTGEEMATK
HIHVFSTTFEEIATK

SEQ ID NO: 281644 - protein, 15 aa, Artificial Sequence
  Description of Artificial Sequence: Synthetic peptide
  Seed: HIHIFSFTGEEMATK
HIHVFSTTFEELATK

SEQ ID NO: 281645 - protein, 15 aa, Artificial Sequence
  Description of Artificial Sequence: Synthetic peptide
  Seed: HIHIFSFTGEEMATK
HIHVFSTTFEEMATK

SEQ ID NO: 281646 - protein, 15 aa, Artificial Sequence
  Description of Artificial Sequence: Synthetic peptide
  Seed: HIHIFSFTGEEMATK
HIHVFSTTFEENATK

SEQ ID NO: 281647 - protein, 15 aa, Artificial Sequence
  Description of Artificial Sequence: Synthetic peptide
  Seed: HIHIFSFTGEEMATK
HIHVFSTTFEESATK

SEQ ID NO: 281648 - protein, 15 aa, Artificial Sequence
  Description of Artificial Sequence: Synthetic peptide
  Seed: HIHIFSFTGEEMATK
HIHVFSTTFEETATK

SEQ ID NO: 281649 - protein, 15 aa, Artificial Sequence
  Description of Artificial Sequence: Synthetic peptide
  Seed: HIHIFSFTGEEMATK
HIHVFSTTFEEVATK

SEQ ID NO: 281650 - protein, 15 aa, Artificial Sequence
  Description of Artificial Sequence: Synthetic peptide
  Seed: HIHIFSFTGEEMATK
HIHVFSTTFEEWATK

SEQ ID NO: 281651 - protein, 15 aa, Artificial Sequence
  Description of Artificial Sequence: Synthetic peptide
  Seed: HIHIFSFTGEEMATK
HIHVFSTTFEEYATK

SEQ ID NO: 281652 - protein, 15 aa, Artificial Sequence
  Description of Artificial Sequence: Synthetic peptide
  Seed: HIHIFSFTGEEMATK
HIHVFSTTLEEIATK

SEQ ID NO: 281653 - protein, 15 aa, Artificial Sequence
  Description of Artificial Sequence: Synthetic peptide
  Seed: HIHIFSFTGEEMATK
HIHVFSTTLEELATK

SEQ ID NO: 281654 - protein, 15 aa, Artificial Sequence
  Description of Artificial Sequence: Synthetic peptide
  Seed: HIHIFSFTGEEMATK
HIHVFSTTLEEVATK

SEQ ID NO: 281655 - protein, 15 aa, Artificial Sequence
  Description of Artificial Sequence: Synthetic peptide
  Seed: HIHIFSFTGEEMATK
HIHVFSTTWEEFATK

SEQ ID NO: 281656 - protein, 15 aa, Artificial Sequence
  Description of Artificial Sequence: Synthetic peptide
  Seed: HIHIFSFTGEEMATK
HIHVFSTTWEEIATK

SEQ ID NO: 281657 - protein, 15 aa, Artificial Sequence
  Description of Artificial Sequence: Synthetic peptide
  Seed: HIHIFSFTGEEMATK
HIHVFSTTWEELATK

SEQ ID NO: 281658 - protein, 15 aa, Artificial Sequence
  Description of Artificial Sequence: Synthetic peptide
  Seed: HIHIFSFTGEEMATK
HIHVFSTTWEEVATK

SEQ ID NO: 281659 - protein, 15 aa, Artificial Sequence
  Description of Artificial Sequence: Synthetic peptide
  Seed: HIHIFSFTGEEMATK
HIHVFSTTYEEFATK

SEQ ID NO: 281660 - protein, 15 aa, Artificial Sequence
  Description of Artificial Sequence: Synthetic peptide
  Seed: HIHIFSFTGEEMATK
HIHVFSTTYEEIATK

SEQ ID NO: 281661 - protein, 15 aa, Artificial Sequence
  Description of Artificial Sequence: Synthetic peptide
  Seed: HIHIFSFTGEEMATK
HIHVFSTTYEELATK

SEQ ID NO: 281662 - protein, 15 aa, Artificial Sequence
  Description of Artificial Sequence: Synthetic peptide
  Seed: HIHIFSFTGEEMATK
HIHVFSTTYEEVATK

SEQ ID NO: 281663 - protein, 15 aa, Artificial Sequence
  Description of Artificial Sequence: Synthetic peptide
  Seed: HIHIFSFTGEEMATK
HIHVFSVTFEEAATK

SEQ ID NO: 281664 - protein, 15 aa, Artificial Sequence
  Description of Artificial Sequence: Synthetic peptide
  Seed: HIHIFSFTGEEMATK
HIHVFSVTFEEEATK

SEQ ID NO: 281665 - protein, 15 aa, Artificial Sequence
  Description of Artificial Sequence: Synthetic peptide
  Seed: HIHIFSFTGEEMATK
HIHVFSVTFEEFATK

SEQ ID NO: 281666 - protein, 15 aa, Artificial Sequence
  Description of Artificial Sequence: Synthetic peptide
  Seed: HIHIFSFTGEEMATK
HIHVFSVTFEEHATK

SEQ ID NO: 281667 - protein, 15 aa, Artificial Sequence
  Description of Artificial Sequence: Synthetic peptide
  Seed: HIHIFSFTGEEMATK
HIHVFSVTFEEIATK

SEQ ID NO: 281668 - protein, 15 aa, Artificial Sequence
  Description of Artificial Sequence: Synthetic peptide
  Seed: HIHIFSFTGEEMATK
HIHVFSVTFEELATK

SEQ ID NO: 281669 - protein, 15 aa, Artificial Sequence
  Description of Artificial Sequence: Synthetic peptide
  Seed: HIHIFSFTGEEMATK
HIHVFSVTFEEMATK

SEQ ID NO: 281670 - protein, 15 aa, Artificial Sequence
  Description of Artificial Sequence: Synthetic peptide
  Seed: HIHIFSFTGEEMATK
HIHVFSVTFEENATK

SEQ ID NO: 281671 - protein, 15 aa, Artificial Sequence
  Description of Artificial Sequence: Synthetic peptide
  Seed: HIHIFSFTGEEMATK
HIHVFSVTFEESATK

SEQ ID NO: 281672 - protein, 15 aa, Artificial Sequence
  Description of Artificial Sequence: Synthetic peptide
  Seed: HIHIFSFTGEEMATK
HIHVFSVTFEETATK

SEQ ID NO: 281673 - protein, 15 aa, Artificial Sequence
  Description of Artificial Sequence: Synthetic peptide
  Seed: HIHIFSFTGEEMATK
HIHVFSVTFEEVATK

SEQ ID NO: 281674 - protein, 15 aa, Artificial Sequence
  Description of Artificial Sequence: Synthetic peptide
  Seed: HIHIFSFTGEEMATK
HIHVFSVTFEEYATK

SEQ ID NO: 281675 - protein, 15 aa, Artificial Sequence
  Description of Artificial Sequence: Synthetic peptide
  Seed: HIHIFSFTGEEMATK
HIHVFSVTLEEIATK

SEQ ID NO: 281676 - protein, 15 aa, Artificial Sequence
  Description of Artificial Sequence: Synthetic peptide
  Seed: HIHIFSFTGEEMATK
HIHVFSVTLEELATK

SEQ ID NO: 281677 - protein, 15 aa, Artificial Sequence
  Description of Artificial Sequence: Synthetic peptide
  Seed: HIHIFSFTGEEMATK
HIHVFSVTWEEFATK

SEQ ID NO: 281678 - protein, 15 aa, Artificial Sequence
  Description of Artificial Sequence: Synthetic peptide
  Seed: HIHIFSFTGEEMATK
HIHVFSVTWEEIATK

SEQ ID NO: 281679 - protein, 15 aa, Artificial Sequence
  Description of Artificial Sequence: Synthetic peptide
  Seed: HIHIFSFTGEEMATK
HIHVFSVTWEELATK

SEQ ID NO: 281680 - protein, 15 aa, Artificial Sequence
  Description of Artificial Sequence: Synthetic peptide
  Seed: HIHIFSFTGEEMATK
HIHVFSVTWEEVATK

SEQ ID NO: 281681 - protein, 15 aa, Artificial Sequence
  Description of Artificial Sequence: Synthetic peptide
  Seed: HIHIFSFTGEEMATK
HIHVFSVTYEEFATK

SEQ ID NO: 281682 - protein, 15 aa, Artificial Sequence
  Description of Artificial Sequence: Synthetic peptide
  Seed: HIHIFSFTGEEMATK
HIHVFSVTYEEIATK

SEQ ID NO: 281683 - protein, 15 aa, Artificial Sequence
  Description of Artificial Sequence: Synthetic peptide
  Seed: HIHIFSFTGEEMATK
HIHVFSVTYEELATK

SEQ ID NO: 281684 - protein, 15 aa, Artificial Sequence
  Description of Artificial Sequence: Synthetic peptide
  Seed: HIHIFSFTGEEMATK
HIHVFSVTYEEMATK

SEQ ID NO: 281685 - protein, 15 aa, Artificial Sequence
  Description of Artificial Sequence: Synthetic peptide
  Seed: HIHIFSFTGEEMATK
HIHVFSVTYEEVATK

SEQ ID NO: 281686 - protein, 15 aa, Artificial Sequence
  Description of Artificial Sequence: Synthetic peptide
  Seed: HIHIFSFTGEEMATK
HIHVFSWTFEEFATK

SEQ ID NO: 281687 - protein, 15 aa, Artificial Sequence
  Description of Artificial Sequence: Synthetic peptide
  Seed: HIHIFSFTGEEMATK
HIHVFSWTFEEIATK

SEQ ID NO: 281688 - protein, 15 aa, Artificial Sequence
  Description of Artificial Sequence: Synthetic peptide
  Seed: HIHIFSFTGEEMATK
HIHVFSWTFEELATK

SEQ ID NO: 281689 - protein, 15 aa, Artificial Sequence
  Description of Artificial Sequence: Synthetic peptide
  Seed: HIHIFSFTGEEMATK
HIHVFSWTFEEMATK

SEQ ID NO: 281690 - protein, 15 aa, Artificial Sequence
  Description of Artificial Sequence: Synthetic peptide
  Seed: HIHIFSFTGEEMATK
HIHVFSWTFEEVATK

SEQ ID NO: 281691 - protein, 15 aa, Artificial Sequence
  Description of Artificial Sequence: Synthetic peptide
  Seed: HIHIFSFTGEEMATK
HIHVFSWTLEELATK

SEQ ID NO: 281692 - protein, 15 aa, Artificial Sequence
  Description of Artificial Sequence: Synthetic peptide
  Seed: HIHIFSFTGEEMATK
HIHVFSYTFEEFATK

SEQ ID NO: 281693 - protein, 15 aa, Artificial Sequence
  Description of Artificial Sequence: Synthetic peptide
  Seed: HIHIFSFTGEEMATK
HIHVFSYTFEEIATK

SEQ ID NO: 281694 - protein, 15 aa, Artificial Sequence
  Description of Artificial Sequence: Synthetic peptide
  Seed: HIHIFSFTGEEMATK
HIHVFSYTFEELATK

SEQ ID NO: 281695 - protein, 15 aa, Artificial Sequence
  Description of Artificial Sequence: Synthetic peptide
  Seed: HIHIFSFTGEEMATK
HIHVFSYTFEEMATK

SEQ ID NO: 281696 - protein, 15 aa, Artificial Sequence
  Description of Artificial Sequence: Synthetic peptide
  Seed: HIHIFSFTGEEMATK
HIHVFSYTFEEVATK

SEQ ID NO: 281697 - protein, 15 aa, Artificial Sequence
  Description of Artificial Sequence: Synthetic peptide
  Seed: HIHIFSFTGEEMATK
HIHVFSYTLEEIATK

SEQ ID NO: 281698 - protein, 15 aa, Artificial Sequence
  Description of Artificial Sequence: Synthetic peptide
  Seed: HIHIFSFTGEEMATK
HIHVFSYTLEELATK

SEQ ID NO: 281699 - protein, 15 aa, Artificial Sequence
  Description of Artificial Sequence: Synthetic peptide
  Seed: HIHIFSFTGEEMATK
HIHWFSATAEEAATK

SEQ ID NO: 281700 - protein, 15 aa, Artificial Sequence
  Description of Artificial Sequence: Synthetic peptide
  Seed: HIHIFSFTGEEMATK
HIHWFSATAEEIATK

SEQ ID NO: 281701 - protein, 15 aa, Artificial Sequence
  Description of Artificial Sequence: Synthetic peptide
  Seed: HIHIFSFTGEEMATK
HIHWFSATAEELATK

SEQ ID NO: 281702 - protein, 15 aa, Artificial Sequence
  Description of Artificial Sequence: Synthetic peptide
  Seed: HIHIFSFTGEEMATK
HIHWFSATAEEMATK

SEQ ID NO: 281703 - protein, 15 aa, Artificial Sequence
  Description of Artificial Sequence: Synthetic peptide
  Seed: HIHIFSFTGEEMATK
HIHWFSATAEESATK

SEQ ID NO: 281704 - protein, 15 aa, Artificial Sequence
  Description of Artificial Sequence: Synthetic peptide
  Seed: HIHIFSFTGEEMATK
HIHWFSATAEEVATK

SEQ ID NO: 281705 - protein, 15 aa, Artificial Sequence
  Description of Artificial Sequence: Synthetic peptide
  Seed: HIHIFSFTGEEMATK
HIHWFSATFEEAATK

SEQ ID NO: 281706 - protein, 15 aa, Artificial Sequence
  Description of Artificial Sequence: Synthetic peptide
  Seed: HIHIFSFTGEEMATK
HIHWFSATFEEDATK

SEQ ID NO: 281707 - protein, 15 aa, Artificial Sequence
  Description of Artificial Sequence: Synthetic peptide
  Seed: HIHIFSFTGEEMATK
HIHWFSATFEEEATK

SEQ ID NO: 281708 - protein, 15 aa, Artificial Sequence
  Description of Artificial Sequence: Synthetic peptide
  Seed: HIHIFSFTGEEMATK
HIHWFSATFEEFATK

SEQ ID NO: 281709 - protein, 15 aa, Artificial Sequence
  Description of Artificial Sequence: Synthetic peptide
  Seed: HIHIFSFTGEEMATK
HIHWFSATFEEIATK

SEQ ID NO: 281710 - protein, 15 aa, Artificial Sequence
  Description of Artificial Sequence: Synthetic peptide
  Seed: HIHIFSFTGEEMATK
HIHWFSATFEELATK

SEQ ID NO: 281711 - protein, 15 aa, Artificial Sequence
  Description of Artificial Sequence: Synthetic peptide
  Seed: HIHIFSFTGEEMATK
HIHWFSATFEEMATK

SEQ ID NO: 281712 - protein, 15 aa, Artificial Sequence
  Description of Artificial Sequence: Synthetic peptide
  Seed: HIHIFSFTGEEMATK
HIHWFSATFEENATK

SEQ ID NO: 281713 - protein, 15 aa, Artificial Sequence
  Description of Artificial Sequence: Synthetic peptide
  Seed: HIHIFSFTGEEMATK
HIHWFSATFEESATK

SEQ ID NO: 281714 - protein, 15 aa, Artificial Sequence
  Description of Artificial Sequence: Synthetic peptide
  Seed: HIHIFSFTGEEMATK
HIHWFSATFEETATK

SEQ ID NO: 281715 - protein, 15 aa, Artificial Sequence
  Description of Artificial Sequence: Synthetic peptide
  Seed: HIHIFSFTGEEMATK
HIHWFSATFEEVATK

SEQ ID NO: 281716 - protein, 15 aa, Artificial Sequence
  Description of Artificial Sequence: Synthetic peptide
  Seed: HIHIFSFTGEEMATK
HIHWFSATFEEYATK

SEQ ID NO: 281717 - protein, 15 aa, Artificial Sequence
  Description of Artificial Sequence: Synthetic peptide
  Seed: HIHIFSFTGEEMATK
HIHWFSATGEEAATK

SEQ ID NO: 281718 - protein, 15 aa, Artificial Sequence
  Description of Artificial Sequence: Synthetic peptide
  Seed: HIHIFSFTGEEMATK
HIHWFSATGEEIATK

SEQ ID NO: 281719 - protein, 15 aa, Artificial Sequence
  Description of Artificial Sequence: Synthetic peptide
  Seed: HIHIFSFTGEEMATK
HIHWFSATGEELATK

SEQ ID NO: 281720 - protein, 15 aa, Artificial Sequence
  Description of Artificial Sequence: Synthetic peptide
  Seed: HIHIFSFTGEEMATK
HIHWFSATGEEVATK

SEQ ID NO: 281721 - protein, 15 aa, Artificial Sequence
  Description of Artificial Sequence: Synthetic peptide
  Seed: HIHIFSFTGEEMATK
HIHWFSATIEEAATK

SEQ ID NO: 281722 - protein, 15 aa, Artificial Sequence
  Description of Artificial Sequence: Synthetic peptide
  Seed: HIHIFSFTGEEMATK
HIHWFSATIEESATK

SEQ ID NO: 281723 - protein, 15 aa, Artificial Sequence
  Description of Artificial Sequence: Synthetic peptide
  Seed: HIHIFSFTGEEMATK
HIHWFSATLEEFATK

SEQ ID NO: 281724 - protein, 15 aa, Artificial Sequence
  Description of Artificial Sequence: Synthetic peptide
  Seed: HIHIFSFTGEEMATK
HIHWFSATLEEIATK

SEQ ID NO: 281725 - protein, 15 aa, Artificial Sequence
  Description of Artificial Sequence: Synthetic peptide
  Seed: HIHIFSFTGEEMATK
HIHWFSATLEELATK

SEQ ID NO: 281726 - protein, 15 aa, Artificial Sequence
  Description of Artificial Sequence: Synthetic peptide
  Seed: HIHIFSFTGEEMATK
HIHWFSATLEEVATK

SEQ ID NO: 281727 - protein, 15 aa, Artificial Sequence
  Description of Artificial Sequence: Synthetic peptide
  Seed: HIHIFSFTGEEMATK
HIHWFSATPEEAATK

SEQ ID NO: 281728 - protein, 15 aa, Artificial Sequence
  Description of Artificial Sequence: Synthetic peptide
  Seed: HIHIFSFTGEEMATK
HIHWFSATSEEAATK

SEQ ID NO: 281729 - protein, 15 aa, Artificial Sequence
  Description of Artificial Sequence: Synthetic peptide
  Seed: HIHIFSFTGEEMATK
HIHWFSATSEEIATK

SEQ ID NO: 281730 - protein, 15 aa, Artificial Sequence
  Description of Artificial Sequence: Synthetic peptide
  Seed: HIHIFSFTGEEMATK
HIHWFSATSEELATK

SEQ ID NO: 281731 - protein, 15 aa, Artificial Sequence
  Description of Artificial Sequence: Synthetic peptide
  Seed: HIHIFSFTGEEMATK
HIHWFSATSEEVATK

SEQ ID NO: 281732 - protein, 15 aa, Artificial Sequence
  Description of Artificial Sequence: Synthetic peptide
  Seed: HIHIFSFTGEEMATK
HIHWFSATVEEAATK

SEQ ID NO: 281733 - protein, 15 aa, Artificial Sequence
  Description of Artificial Sequence: Synthetic peptide
  Seed: HIHIFSFTGEEMATK
HIHWFSATVEESATK

SEQ ID NO: 281734 - protein, 15 aa, Artificial Sequence
  Description of Artificial Sequence: Synthetic peptide
  Seed: HIHIFSFTGEEMATK
HIHWFSATWEEIATK

SEQ ID NO: 281735 - protein, 15 aa, Artificial Sequence
  Description of Artificial Sequence: Synthetic peptide
  Seed: HIHIFSFTGEEMATK
HIHWFSATWEELATK

SEQ ID NO: 281736 - protein, 15 aa, Artificial Sequence
  Description of Artificial Sequence: Synthetic peptide
  Seed: HIHIFSFTGEEMATK
HIHWFSATYEEFATK

SEQ ID NO: 281737 - protein, 15 aa, Artificial Sequence
  Description of Artificial Sequence: Synthetic peptide
  Seed: HIHIFSFTGEEMATK
HIHWFSATYEEIATK

SEQ ID NO: 281738 - protein, 15 aa, Artificial Sequence
  Description of Artificial Sequence: Synthetic peptide
  Seed: HIHIFSFTGEEMATK
HIHWFSATYEELATK

SEQ ID NO: 281739 - protein, 15 aa, Artificial Sequence
  Description of Artificial Sequence: Synthetic peptide
  Seed: HIHIFSFTGEEMATK
HIHWFSATYEEMATK

SEQ ID NO: 281740 - protein, 15 aa, Artificial Sequence
  Description of Artificial Sequence: Synthetic peptide
  Seed: HIHIFSFTGEEMATK
HIHWFSATYEEVATK

SEQ ID NO: 281741 - protein, 15 aa, Artificial Sequence
  Description of Artificial Sequence: Synthetic peptide
  Seed: HIHIFSFTGEEMATK
HIHWFSCTFEEFATK

SEQ ID NO: 281742 - protein, 15 aa, Artificial Sequence
  Description of Artificial Sequence: Synthetic peptide
  Seed: HIHIFSFTGEEMATK
HIHWFSCTFEEIATK

SEQ ID NO: 281743 - protein, 15 aa, Artificial Sequence
  Description of Artificial Sequence: Synthetic peptide
  Seed: HIHIFSFTGEEMATK
HIHWFSCTFEELATK

SEQ ID NO: 281744 - protein, 15 aa, Artificial Sequence
  Description of Artificial Sequence: Synthetic peptide
  Seed: HIHIFSFTGEEMATK
HIHWFSCTFEEVATK

SEQ ID NO: 281745 - protein, 15 aa, Artificial Sequence
  Description of Artificial Sequence: Synthetic peptide
  Seed: HIHIFSFTGEEMATK
HIHWFSDTFEEFATK

SEQ ID NO: 281746 - protein, 15 aa, Artificial Sequence
  Description of Artificial Sequence: Synthetic peptide
  Seed: HIHIFSFTGEEMATK
HIHWFSDTFEEIATK

SEQ ID NO: 281747 - protein, 15 aa, Artificial Sequence
  Description of Artificial Sequence: Synthetic peptide
  Seed: HIHIFSFTGEEMATK
HIHWFSDTFEELATK

SEQ ID NO: 281748 - protein, 15 aa, Artificial Sequence
  Description of Artificial Sequence: Synthetic peptide
  Seed: HIHIFSFTGEEMATK
HIHWFSDTFEEVATK

SEQ ID NO: 281749 - protein, 15 aa, Artificial Sequence
  Description of Artificial Sequence: Synthetic peptide
  Seed: HIHIFSFTGEEMATK
HIHWFSETFEEAATK

SEQ ID NO: 281750 - protein, 15 aa, Artificial Sequence
  Description of Artificial Sequence: Synthetic peptide
  Seed: HIHIFSFTGEEMATK
HIHWFSETFEEFATK

SEQ ID NO: 281751 - protein, 15 aa, Artificial Sequence
  Description of Artificial Sequence: Synthetic peptide
  Seed: HIHIFSFTGEEMATK
HIHWFSETFEEIATK

SEQ ID NO: 281752 - protein, 15 aa, Artificial Sequence
  Description of Artificial Sequence: Synthetic peptide
  Seed: HIHIFSFTGEEMATK
HIHWFSETFEELATK

SEQ ID NO: 281753 - protein, 15 aa, Artificial Sequence
  Description of Artificial Sequence: Synthetic peptide
  Seed: HIHIFSFTGEEMATK
HIHWFSETFEEMATK

SEQ ID NO: 281754 - protein, 15 aa, Artificial Sequence
  Description of Artificial Sequence: Synthetic peptide
  Seed: HIHIFSFTGEEMATK
HIHWFSETFEETATK

SEQ ID NO: 281755 - protein, 15 aa, Artificial Sequence
  Description of Artificial Sequence: Synthetic peptide
  Seed: HIHIFSFTGEEMATK
HIHWFSETFEEVATK

SEQ ID NO: 281756 - protein, 15 aa, Artificial Sequence
  Description of Artificial Sequence: Synthetic peptide
  Seed: HIHIFSFTGEEMATK
HIHWFSETFEEYATK

SEQ ID NO: 281757 - protein, 15 aa, Artificial Sequence
  Description of Artificial Sequence: Synthetic peptide
  Seed: HIHIFSFTGEEMATK
HIHWFSETLEEIATK

SEQ ID NO: 281758 - protein, 15 aa, Artificial Sequence
  Description of Artificial Sequence: Synthetic peptide
  Seed: HIHIFSFTGEEMATK
HIHWFSETLEELATK

SEQ ID NO: 281759 - protein, 15 aa, Artificial Sequence
  Description of Artificial Sequence: Synthetic peptide
  Seed: HIHIFSFTGEEMATK
HIHWFSETWEELATK

SEQ ID NO: 281760 - protein, 15 aa, Artificial Sequence
  Description of Artificial Sequence: Synthetic peptide
  Seed: HIHIFSFTGEEMATK
HIHWFSETYEEIATK

SEQ ID NO: 281761 - protein, 15 aa, Artificial Sequence
  Description of Artificial Sequence: Synthetic peptide
  Seed: HIHIFSFTGEEMATK
HIHWFSETYEELATK

SEQ ID NO: 281762 - protein, 15 aa, Artificial Sequence
  Description of Artificial Sequence: Synthetic peptide
  Seed: HIHIFSFTGEEMATK
HIHWFSFTAEEAATK

SEQ ID NO: 281763 - protein, 15 aa, Artificial Sequence
  Description of Artificial Sequence: Synthetic peptide
  Seed: HIHIFSFTGEEMATK
HIHWFSFTAEEFATK

SEQ ID NO: 281764 - protein, 15 aa, Artificial Sequence
  Description of Artificial Sequence: Synthetic peptide
  Seed: HIHIFSFTGEEMATK
HIHWFSFTAEELATK

SEQ ID NO: 281765 - protein, 15 aa, Artificial Sequence
  Description of Artificial Sequence: Synthetic peptide
  Seed: HIHIFSFTGEEMATK
HIHWFSFTFEEAATK

SEQ ID NO: 281766 - protein, 15 aa, Artificial Sequence
  Description of Artificial Sequence: Synthetic peptide
  Seed: HIHIFSFTGEEMATK
HIHWFSFTFEEDATK

SEQ ID NO: 281767 - protein, 15 aa, Artificial Sequence
  Description of Artificial Sequence: Synthetic peptide
  Seed: HIHIFSFTGEEMATK
HIHWFSFTFEEEATK

SEQ ID NO: 281768 - protein, 15 aa, Artificial Sequence
  Description of Artificial Sequence: Synthetic peptide
  Seed: HIHIFSFTGEEMATK
HIHWFSFTFEEFATK

SEQ ID NO: 281769 - protein, 15 aa, Artificial Sequence
  Description of Artificial Sequence: Synthetic peptide
  Seed: HIHIFSFTGEEMATK
HIHWFSFTFEEHATK

SEQ ID NO: 281770 - protein, 15 aa, Artificial Sequence
  Description of Artificial Sequence: Synthetic peptide
  Seed: HIHIFSFTGEEMATK
HIHWFSFTFEEIATK

SEQ ID NO: 281771 - protein, 15 aa, Artificial Sequence
  Description of Artificial Sequence: Synthetic peptide
  Seed: HIHIFSFTGEEMATK
HIHWFSFTFEEKATK

SEQ ID NO: 281772 - protein, 15 aa, Artificial Sequence
  Description of Artificial Sequence: Synthetic peptide
  Seed: HIHIFSFTGEEMATK
HIHWFSFTFEELATK

SEQ ID NO: 281773 - protein, 15 aa, Artificial Sequence
  Description of Artificial Sequence: Synthetic peptide
  Seed: HIHIFSFTGEEMATK
HIHWFSFTFEEMATK

SEQ ID NO: 281774 - protein, 15 aa, Artificial Sequence
  Description of Artificial Sequence: Synthetic peptide
  Seed: HIHIFSFTGEEMATK
HIHWFSFTFEENATK

SEQ ID NO: 281775 - protein, 15 aa, Artificial Sequence
  Description of Artificial Sequence: Synthetic peptide
  Seed: HIHIFSFTGEEMATK
HIHWFSFTFEEPATK

SEQ ID NO: 281776 - protein, 15 aa, Artificial Sequence
  Description of Artificial Sequence: Synthetic peptide
  Seed: HIHIFSFTGEEMATK
HIHWFSFTFEERATK

SEQ ID NO: 281777 - protein, 15 aa, Artificial Sequence
  Description of Artificial Sequence: Synthetic peptide
  Seed: HIHIFSFTGEEMATK
HIHWFSFTFEESATK

SEQ ID NO: 281778 - protein, 15 aa, Artificial Sequence
  Description of Artificial Sequence: Synthetic peptide
  Seed: HIHIFSFTGEEMATK
HIHWFSFTFEETATK

SEQ ID NO: 281779 - protein, 15 aa, Artificial Sequence
  Description of Artificial Sequence: Synthetic peptide
  Seed: HIHIFSFTGEEMATK
HIHWFSFTFEEVATK

SEQ ID NO: 281780 - protein, 15 aa, Artificial Sequence
  Description of Artificial Sequence: Synthetic peptide
  Seed: HIHIFSFTGEEMATK
HIHWFSFTFEEYATK

SEQ ID NO: 281781 - protein, 15 aa, Artificial Sequence
  Description of Artificial Sequence: Synthetic peptide
  Seed: HIHIFSFTGEEMATK
HIHWFSFTIEEFATK

SEQ ID NO: 281782 - protein, 15 aa, Artificial Sequence
  Description of Artificial Sequence: Synthetic peptide
  Seed: HIHIFSFTGEEMATK
HIHWFSFTIEEIATK

SEQ ID NO: 281783 - protein, 15 aa, Artificial Sequence
  Description of Artificial Sequence: Synthetic peptide
  Seed: HIHIFSFTGEEMATK
HIHWFSFTIEELATK

SEQ ID NO: 281784 - protein, 15 aa, Artificial Sequence
  Description of Artificial Sequence: Synthetic peptide
  Seed: HIHIFSFTGEEMATK
HIHWFSFTIEEMATK

SEQ ID NO: 281785 - protein, 15 aa, Artificial Sequence
  Description of Artificial Sequence: Synthetic peptide
  Seed: HIHIFSFTGEEMATK
HIHWFSFTIEEVATK

SEQ ID NO: 281786 - protein, 15 aa, Artificial Sequence
  Description of Artificial Sequence: Synthetic peptide
  Seed: HIHIFSFTGEEMATK
HIHWFSFTLEEAATK

SEQ ID NO: 281787 - protein, 15 aa, Artificial Sequence
  Description of Artificial Sequence: Synthetic peptide
  Seed: HIHIFSFTGEEMATK
HIHWFSFTLEEFATK

SEQ ID NO: 281788 - protein, 15 aa, Artificial Sequence
  Description of Artificial Sequence: Synthetic peptide
  Seed: HIHIFSFTGEEMATK
HIHWFSFTLEEIATK

SEQ ID NO: 281789 - protein, 15 aa, Artificial Sequence
  Description of Artificial Sequence: Synthetic peptide
  Seed: HIHIFSFTGEEMATK
HIHWFSFTLEELATK

SEQ ID NO: 281790 - protein, 15 aa, Artificial Sequence
  Description of Artificial Sequence: Synthetic peptide
  Seed: HIHIFSFTGEEMATK
HIHWFSFTLEEMATK

SEQ ID NO: 281791 - protein, 15 aa, Artificial Sequence
  Description of Artificial Sequence: Synthetic peptide
  Seed: HIHIFSFTGEEMATK
HIHWFSFTLEERATK

SEQ ID NO: 281792 - protein, 15 aa, Artificial Sequence
  Description of Artificial Sequence: Synthetic peptide
  Seed: HIHIFSFTGEEMATK
HIHWFSFTLEETATK

SEQ ID NO: 281793 - protein, 15 aa, Artificial Sequence
  Description of Artificial Sequence: Synthetic peptide
  Seed: HIHIFSFTGEEMATK
HIHWFSFTLEEVATK

SEQ ID NO: 281794 - protein, 15 aa, Artificial Sequence
  Description of Artificial Sequence: Synthetic peptide
  Seed: HIHIFSFTGEEMATK
HIHWFSFTLEEYATK

SEQ ID NO: 281795 - protein, 15 aa, Artificial Sequence
  Description of Artificial Sequence: Synthetic peptide
  Seed: HIHIFSFTGEEMATK
HIHWFSFTMEEFATK

SEQ ID NO: 281796 - protein, 15 aa, Artificial Sequence
  Description of Artificial Sequence: Synthetic peptide
  Seed: HIHIFSFTGEEMATK
HIHWFSFTMEEIATK

SEQ ID NO: 281797 - protein, 15 aa, Artificial Sequence
  Description of Artificial Sequence: Synthetic peptide
  Seed: HIHIFSFTGEEMATK
HIHWFSFTMEELATK

SEQ ID NO: 281798 - protein, 15 aa, Artificial Sequence
  Description of Artificial Sequence: Synthetic peptide
  Seed: HIHIFSFTGEEMATK
HIHWFSFTMEEMATK

SEQ ID NO: 281799 - protein, 15 aa, Artificial Sequence
  Description of Artificial Sequence: Synthetic peptide
  Seed: HIHIFSFTGEEMATK
HIHWFSFTMEEVATK

SEQ ID NO: 281800 - protein, 15 aa, Artificial Sequence
  Description of Artificial Sequence: Synthetic peptide
  Seed: HIHIFSFTGEEMATK
HIHWFSFTVEEFATK

SEQ ID NO: 281801 - protein, 15 aa, Artificial Sequence
  Description of Artificial Sequence: Synthetic peptide
  Seed: HIHIFSFTGEEMATK
HIHWFSFTVEELATK

SEQ ID NO: 281802 - protein, 15 aa, Artificial Sequence
  Description of Artificial Sequence: Synthetic peptide
  Seed: HIHIFSFTGEEMATK
HIHWFSFTWEEFATK

SEQ ID NO: 281803 - protein, 15 aa, Artificial Sequence
  Description of Artificial Sequence: Synthetic peptide
  Seed: HIHIFSFTGEEMATK
HIHWFSFTWEEIATK

SEQ ID NO: 281804 - protein, 15 aa, Artificial Sequence
  Description of Artificial Sequence: Synthetic peptide
  Seed: HIHIFSFTGEEMATK
HIHWFSFTWEELATK

SEQ ID NO: 281805 - protein, 15 aa, Artificial Sequence
  Description of Artificial Sequence: Synthetic peptide
  Seed: HIHIFSFTGEEMATK
HIHWFSFTWEEMATK

SEQ ID NO: 281806 - protein, 15 aa, Artificial Sequence
  Description of Artificial Sequence: Synthetic peptide
  Seed: HIHIFSFTGEEMATK
HIHWFSFTWEEVATK

SEQ ID NO: 281807 - protein, 15 aa, Artificial Sequence
  Description of Artificial Sequence: Synthetic peptide
  Seed: HIHIFSFTGEEMATK
HIHWFSFTYEEFATK

SEQ ID NO: 281808 - protein, 15 aa, Artificial Sequence
  Description of Artificial Sequence: Synthetic peptide
  Seed: HIHIFSFTGEEMATK
HIHWFSFTYEEIATK

SEQ ID NO: 281809 - protein, 15 aa, Artificial Sequence
  Description of Artificial Sequence: Synthetic peptide
  Seed: HIHIFSFTGEEMATK
HIHWFSFTYEELATK

SEQ ID NO: 281810 - protein, 15 aa, Artificial Sequence
  Description of Artificial Sequence: Synthetic peptide
  Seed: HIHIFSFTGEEMATK
HIHWFSFTYEEMATK

SEQ ID NO: 281811 - protein, 15 aa, Artificial Sequence
  Description of Artificial Sequence: Synthetic peptide
  Seed: HIHIFSFTGEEMATK
HIHWFSFTYEEVATK

SEQ ID NO: 281812 - protein, 15 aa, Artificial Sequence
  Description of Artificial Sequence: Synthetic peptide
  Seed: HIHIFSFTGEEMATK
HIHWFSFTYEEYATK

SEQ ID NO: 281813 - protein, 15 aa, Artificial Sequence
  Description of Artificial Sequence: Synthetic peptide
  Seed: HIHIFSFTGEEMATK
HIHWFSGTFEEIATK

SEQ ID NO: 281814 - protein, 15 aa, Artificial Sequence
  Description of Artificial Sequence: Synthetic peptide
  Seed: HIHIFSFTGEEMATK
HIHWFSGTFEELATK

SEQ ID NO: 281815 - protein, 15 aa, Artificial Sequence
  Description of Artificial Sequence: Synthetic peptide
  Seed: HIHIFSFTGEEMATK
HIHWFSHTFEEAATK

SEQ ID NO: 281816 - protein, 15 aa, Artificial Sequence
  Description of Artificial Sequence: Synthetic peptide
  Seed: HIHIFSFTGEEMATK
HIHWFSHTFEEFATK

SEQ ID NO: 281817 - protein, 15 aa, Artificial Sequence
  Description of Artificial Sequence: Synthetic peptide
  Seed: HIHIFSFTGEEMATK
HIHWFSHTFEEIATK

SEQ ID NO: 281818 - protein, 15 aa, Artificial Sequence
  Description of Artificial Sequence: Synthetic peptide
  Seed: HIHIFSFTGEEMATK
HIHWFSHTFEELATK

SEQ ID NO: 281819 - protein, 15 aa, Artificial Sequence
  Description of Artificial Sequence: Synthetic peptide
  Seed: HIHIFSFTGEEMATK
HIHWFSHTFEEMATK

SEQ ID NO: 281820 - protein, 15 aa, Artificial Sequence
  Description of Artificial Sequence: Synthetic peptide
  Seed: HIHIFSFTGEEMATK
HIHWFSHTFEESATK

SEQ ID NO: 281821 - protein, 15 aa, Artificial Sequence
  Description of Artificial Sequence: Synthetic peptide
  Seed: HIHIFSFTGEEMATK
HIHWFSHTFEETATK

SEQ ID NO: 281822 - protein, 15 aa, Artificial Sequence
  Description of Artificial Sequence: Synthetic peptide
  Seed: HIHIFSFTGEEMATK
HIHWFSHTFEEVATK

SEQ ID NO: 281823 - protein, 15 aa, Artificial Sequence
  Description of Artificial Sequence: Synthetic peptide
  Seed: HIHIFSFTGEEMATK
HIHWFSHTFEEWATK

SEQ ID NO: 281824 - protein, 15 aa, Artificial Sequence
  Description of Artificial Sequence: Synthetic peptide
  Seed: HIHIFSFTGEEMATK
HIHWFSHTFEEYATK

SEQ ID NO: 281825 - protein, 15 aa, Artificial Sequence
  Description of Artificial Sequence: Synthetic peptide
  Seed: HIHIFSFTGEEMATK
HIHWFSHTIEEIATK

SEQ ID NO: 281826 - protein, 15 aa, Artificial Sequence
  Description of Artificial Sequence: Synthetic peptide
  Seed: HIHIFSFTGEEMATK
HIHWFSHTIEELATK

SEQ ID NO: 281827 - protein, 15 aa, Artificial Sequence
  Description of Artificial Sequence: Synthetic peptide
  Seed: HIHIFSFTGEEMATK
HIHWFSHTLEEFATK

SEQ ID NO: 281828 - protein, 15 aa, Artificial Sequence
  Description of Artificial Sequence: Synthetic peptide
  Seed: HIHIFSFTGEEMATK
HIHWFSHTLEEIATK

SEQ ID NO: 281829 - protein, 15 aa, Artificial Sequence
  Description of Artificial Sequence: Synthetic peptide
  Seed: HIHIFSFTGEEMATK
HIHWFSHTLEELATK

SEQ ID NO: 281830 - protein, 15 aa, Artificial Sequence
  Description of Artificial Sequence: Synthetic peptide
  Seed: HIHIFSFTGEEMATK
HIHWFSHTLEEVATK

SEQ ID NO: 281831 - protein, 15 aa, Artificial Sequence
  Description of Artificial Sequence: Synthetic peptide
  Seed: HIHIFSFTGEEMATK
HIHWFSHTMEELATK

SEQ ID NO: 281832 - protein, 15 aa, Artificial Sequence
  Description of Artificial Sequence: Synthetic peptide
  Seed: HIHIFSFTGEEMATK
HIHWFSHTWEEIATK

SEQ ID NO: 281833 - protein, 15 aa, Artificial Sequence
  Description of Artificial Sequence: Synthetic peptide
  Seed: HIHIFSFTGEEMATK
HIHWFSHTWEELATK

SEQ ID NO: 281834 - protein, 15 aa, Artificial Sequence
  Description of Artificial Sequence: Synthetic peptide
  Seed: HIHIFSFTGEEMATK
HIHWFSHTWEEVATK

SEQ ID NO: 281835 - protein, 15 aa, Artificial Sequence
  Description of Artificial Sequence: Synthetic peptide
  Seed: HIHIFSFTGEEMATK
HIHWFSHTYEEIATK

SEQ ID NO: 281836 - protein, 15 aa, Artificial Sequence
  Description of Artificial Sequence: Synthetic peptide
  Seed: HIHIFSFTGEEMATK
HIHWFSHTYEELATK

SEQ ID NO: 281837 - protein, 15 aa, Artificial Sequence
  Description of Artificial Sequence: Synthetic peptide
  Seed: HIHIFSFTGEEMATK
HIHWFSHTYEEVATK

SEQ ID NO: 281838 - protein, 15 aa, Artificial Sequence
  Description of Artificial Sequence: Synthetic peptide
  Seed: HIHIFSFTGEEMATK
HIHWFSITAEEAATK

SEQ ID NO: 281839 - protein, 15 aa, Artificial Sequence
  Description of Artificial Sequence: Synthetic peptide
  Seed: HIHIFSFTGEEMATK
HIHWFSITAEEGATK

SEQ ID NO: 281840 - protein, 15 aa, Artificial Sequence
  Description of Artificial Sequence: Synthetic peptide
  Seed: HIHIFSFTGEEMATK
HIHWFSITAEEHATK

SEQ ID NO: 281841 - protein, 15 aa, Artificial Sequence
  Description of Artificial Sequence: Synthetic peptide
  Seed: HIHIFSFTGEEMATK
HIHWFSITAEEIATK

SEQ ID NO: 281842 - protein, 15 aa, Artificial Sequence
  Description of Artificial Sequence: Synthetic peptide
  Seed: HIHIFSFTGEEMATK
HIHWFSITAEELATK

SEQ ID NO: 281843 - protein, 15 aa, Artificial Sequence
  Description of Artificial Sequence: Synthetic peptide
  Seed: HIHIFSFTGEEMATK
HIHWFSITAEEMATK

SEQ ID NO: 281844 - protein, 15 aa, Artificial Sequence
  Description of Artificial Sequence: Synthetic peptide
  Seed: HIHIFSFTGEEMATK
HIHWFSITAEENATK

SEQ ID NO: 281845 - protein, 15 aa, Artificial Sequence
  Description of Artificial Sequence: Synthetic peptide
  Seed: HIHIFSFTGEEMATK
HIHWFSITAEESATK

SEQ ID NO: 281846 - protein, 15 aa, Artificial Sequence
  Description of Artificial Sequence: Synthetic peptide
  Seed: HIHIFSFTGEEMATK
HIHWFSITAEETATK

SEQ ID NO: 281847 - protein, 15 aa, Artificial Sequence
  Description of Artificial Sequence: Synthetic peptide
  Seed: HIHIFSFTGEEMATK
HIHWFSITAEEVATK

SEQ ID NO: 281848 - protein, 15 aa, Artificial Sequence
  Description of Artificial Sequence: Synthetic peptide
  Seed: HIHIFSFTGEEMATK
HIHWFSITFEEAATK

SEQ ID NO: 281849 - protein, 15 aa, Artificial Sequence
  Description of Artificial Sequence: Synthetic peptide
  Seed: HIHIFSFTGEEMATK
HIHWFSITFEEDATK

SEQ ID NO: 281850 - protein, 15 aa, Artificial Sequence
  Description of Artificial Sequence: Synthetic peptide
  Seed: HIHIFSFTGEEMATK
HIHWFSITFEEEATK

SEQ ID NO: 281851 - protein, 15 aa, Artificial Sequence
  Description of Artificial Sequence: Synthetic peptide
  Seed: HIHIFSFTGEEMATK
HIHWFSITFEEFATK

SEQ ID NO: 281852 - protein, 15 aa, Artificial Sequence
  Description of Artificial Sequence: Synthetic peptide
  Seed: HIHIFSFTGEEMATK
HIHWFSITFEEHATK

SEQ ID NO: 281853 - protein, 15 aa, Artificial Sequence
  Description of Artificial Sequence: Synthetic peptide
  Seed: HIHIFSFTGEEMATK
HIHWFSITFEEIATK

SEQ ID NO: 281854 - protein, 15 aa, Artificial Sequence
  Description of Artificial Sequence: Synthetic peptide
  Seed: HIHIFSFTGEEMATK
HIHWFSITFEELATK

SEQ ID NO: 281855 - protein, 15 aa, Artificial Sequence
  Description of Artificial Sequence: Synthetic peptide
  Seed: HIHIFSFTGEEMATK
HIHWFSITFEEMATK

SEQ ID NO: 281856 - protein, 15 aa, Artificial Sequence
  Description of Artificial Sequence: Synthetic peptide
  Seed: HIHIFSFTGEEMATK
HIHWFSITFEENATK

SEQ ID NO: 281857 - protein, 15 aa, Artificial Sequence
  Description of Artificial Sequence: Synthetic peptide
  Seed: HIHIFSFTGEEMATK
HIHWFSITFEEPATK

SEQ ID NO: 281858 - protein, 15 aa, Artificial Sequence
  Description of Artificial Sequence: Synthetic peptide
  Seed: HIHIFSFTGEEMATK
HIHWFSITFEEQATK

SEQ ID NO: 281859 - protein, 15 aa, Artificial Sequence
  Description of Artificial Sequence: Synthetic peptide
  Seed: HIHIFSFTGEEMATK
HIHWFSITFEERATK

SEQ ID NO: 281860 - protein, 15 aa, Artificial Sequence
  Description of Artificial Sequence: Synthetic peptide
  Seed: HIHIFSFTGEEMATK
HIHWFSITFEESATK

SEQ ID NO: 281861 - protein, 15 aa, Artificial Sequence
  Description of Artificial Sequence: Synthetic peptide
  Seed: HIHIFSFTGEEMATK
HIHWFSITFEETATK

SEQ ID NO: 281862 - protein, 15 aa, Artificial Sequence
  Description of Artificial Sequence: Synthetic peptide
  Seed: HIHIFSFTGEEMATK
HIHWFSITFEEVATK

SEQ ID NO: 281863 - protein, 15 aa, Artificial Sequence
  Description of Artificial Sequence: Synthetic peptide
  Seed: HIHIFSFTGEEMATK
HIHWFSITFEEYATK

SEQ ID NO: 281864 - protein, 15 aa, Artificial Sequence
  Description of Artificial Sequence: Synthetic peptide
  Seed: HIHIFSFTGEEMATK
HIHWFSITGEEAATK

SEQ ID NO: 281865 - protein, 15 aa, Artificial Sequence
  Description of Artificial Sequence: Synthetic peptide
  Seed: HIHIFSFTGEEMATK
HIHWFSITGEEIATK

SEQ ID NO: 281866 - protein, 15 aa, Artificial Sequence
  Description of Artificial Sequence: Synthetic peptide
  Seed: HIHIFSFTGEEMATK
HIHWFSITGEELATK

SEQ ID NO: 281867 - protein, 15 aa, Artificial Sequence
  Description of Artificial Sequence: Synthetic peptide
  Seed: HIHIFSFTGEEMATK
HIHWFSITGEEMATK

SEQ ID NO: 281868 - protein, 15 aa, Artificial Sequence
  Description of Artificial Sequence: Synthetic peptide
  Seed: HIHIFSFTGEEMATK
HIHWFSITGEETATK

SEQ ID NO: 281869 - protein, 15 aa, Artificial Sequence
  Description of Artificial Sequence: Synthetic peptide
  Seed: HIHIFSFTGEEMATK
HIHWFSITGEEVATK

SEQ ID NO: 281870 - protein, 15 aa, Artificial Sequence
  Description of Artificial Sequence: Synthetic peptide
  Seed: HIHIFSFTGEEMATK
HIHWFSITIEEAATK

SEQ ID NO: 281871 - protein, 15 aa, Artificial Sequence
  Description of Artificial Sequence: Synthetic peptide
  Seed: HIHIFSFTGEEMATK
HIHWFSITIEEFATK

SEQ ID NO: 281872 - protein, 15 aa, Artificial Sequence
  Description of Artificial Sequence: Synthetic peptide
  Seed: HIHIFSFTGEEMATK
HIHWFSITIEEIATK

SEQ ID NO: 281873 - protein, 15 aa, Artificial Sequence
  Description of Artificial Sequence: Synthetic peptide
  Seed: HIHIFSFTGEEMATK
HIHWFSITIEELATK

SEQ ID NO: 281874 - protein, 15 aa, Artificial Sequence
  Description of Artificial Sequence: Synthetic peptide
  Seed: HIHIFSFTGEEMATK
HIHWFSITIEENATK

SEQ ID NO: 281875 - protein, 15 aa, Artificial Sequence
  Description of Artificial Sequence: Synthetic peptide
  Seed: HIHIFSFTGEEMATK
HIHWFSITIEESATK

SEQ ID NO: 281876 - protein, 15 aa, Artificial Sequence
  Description of Artificial Sequence: Synthetic peptide
  Seed: HIHIFSFTGEEMATK
HIHWFSITIEETATK

SEQ ID NO: 281877 - protein, 15 aa, Artificial Sequence
  Description of Artificial Sequence: Synthetic peptide
  Seed: HIHIFSFTGEEMATK
HIHWFSITIEEVATK

SEQ ID NO: 281878 - protein, 15 aa, Artificial Sequence
  Description of Artificial Sequence: Synthetic peptide
  Seed: HIHIFSFTGEEMATK
HIHWFSITLEEFATK

SEQ ID NO: 281879 - protein, 15 aa, Artificial Sequence
  Description of Artificial Sequence: Synthetic peptide
  Seed: HIHIFSFTGEEMATK
HIHWFSITLEEIATK

SEQ ID NO: 281880 - protein, 15 aa, Artificial Sequence
  Description of Artificial Sequence: Synthetic peptide
  Seed: HIHIFSFTGEEMATK
HIHWFSITLEELATK

SEQ ID NO: 281881 - protein, 15 aa, Artificial Sequence
  Description of Artificial Sequence: Synthetic peptide
  Seed: HIHIFSFTGEEMATK
HIHWFSITLEEMATK

SEQ ID NO: 281882 - protein, 15 aa, Artificial Sequence
  Description of Artificial Sequence: Synthetic peptide
  Seed: HIHIFSFTGEEMATK
HIHWFSITLEEVATK

SEQ ID NO: 281883 - protein, 15 aa, Artificial Sequence
  Description of Artificial Sequence: Synthetic peptide
  Seed: HIHIFSFTGEEMATK
HIHWFSITLEEYATK

SEQ ID NO: 281884 - protein, 15 aa, Artificial Sequence
  Description of Artificial Sequence: Synthetic peptide
  Seed: HIHIFSFTGEEMATK
HIHWFSITMEEFATK

SEQ ID NO: 281885 - protein, 15 aa, Artificial Sequence
  Description of Artificial Sequence: Synthetic peptide
  Seed: HIHIFSFTGEEMATK
HIHWFSITMEEIATK

SEQ ID NO: 281886 - protein, 15 aa, Artificial Sequence
  Description of Artificial Sequence: Synthetic peptide
  Seed: HIHIFSFTGEEMATK
HIHWFSITMEELATK

SEQ ID NO: 281887 - protein, 15 aa, Artificial Sequence
  Description of Artificial Sequence: Synthetic peptide
  Seed: HIHIFSFTGEEMATK
HIHWFSITMEEVATK

SEQ ID NO: 281888 - protein, 15 aa, Artificial Sequence
  Description of Artificial Sequence: Synthetic peptide
  Seed: HIHIFSFTGEEMATK
HIHWFSITNEEAATK

SEQ ID NO: 281889 - protein, 15 aa, Artificial Sequence
  Description of Artificial Sequence: Synthetic peptide
  Seed: HIHIFSFTGEEMATK
HIHWFSITPEEAATK

SEQ ID NO: 281890 - protein, 15 aa, Artificial Sequence
  Description of Artificial Sequence: Synthetic peptide
  Seed: HIHIFSFTGEEMATK
HIHWFSITPEEIATK

SEQ ID NO: 281891 - protein, 15 aa, Artificial Sequence
  Description of Artificial Sequence: Synthetic peptide
  Seed: HIHIFSFTGEEMATK
HIHWFSITPEELATK

SEQ ID NO: 281892 - protein, 15 aa, Artificial Sequence
  Description of Artificial Sequence: Synthetic peptide
  Seed: HIHIFSFTGEEMATK
HIHWFSITPEEMATK

SEQ ID NO: 281893 - protein, 15 aa, Artificial Sequence
  Description of Artificial Sequence: Synthetic peptide
  Seed: HIHIFSFTGEEMATK
HIHWFSITPEENATK

SEQ ID NO: 281894 - protein, 15 aa, Artificial Sequence
  Description of Artificial Sequence: Synthetic peptide
  Seed: HIHIFSFTGEEMATK
HIHWFSITPEESATK

SEQ ID NO: 281895 - protein, 15 aa, Artificial Sequence
  Description of Artificial Sequence: Synthetic peptide
  Seed: HIHIFSFTGEEMATK
HIHWFSITPEETATK

SEQ ID NO: 281896 - protein, 15 aa, Artificial Sequence
  Description of Artificial Sequence: Synthetic peptide
  Seed: HIHIFSFTGEEMATK
HIHWFSITPEEVATK

SEQ ID NO: 281897 - protein, 15 aa, Artificial Sequence
  Description of Artificial Sequence: Synthetic peptide
  Seed: HIHIFSFTGEEMATK
HIHWFSITSEEAATK

SEQ ID NO: 281898 - protein, 15 aa, Artificial Sequence
  Description of Artificial Sequence: Synthetic peptide
  Seed: HIHIFSFTGEEMATK
HIHWFSITSEEIATK

SEQ ID NO: 281899 - protein, 15 aa, Artificial Sequence
  Description of Artificial Sequence: Synthetic peptide
  Seed: HIHIFSFTGEEMATK
HIHWFSITSEELATK

SEQ ID NO: 281900 - protein, 15 aa, Artificial Sequence
  Description of Artificial Sequence: Synthetic peptide
  Seed: HIHIFSFTGEEMATK
HIHWFSITSEEMATK

SEQ ID NO: 281901 - protein, 15 aa, Artificial Sequence
  Description of Artificial Sequence: Synthetic peptide
  Seed: HIHIFSFTGEEMATK
HIHWFSITSEENATK

SEQ ID NO: 281902 - protein, 15 aa, Artificial Sequence
  Description of Artificial Sequence: Synthetic peptide
  Seed: HIHIFSFTGEEMATK
HIHWFSITSEESATK

SEQ ID NO: 281903 - protein, 15 aa, Artificial Sequence
  Description of Artificial Sequence: Synthetic peptide
  Seed: HIHIFSFTGEEMATK
HIHWFSITSEETATK

SEQ ID NO: 281904 - protein, 15 aa, Artificial Sequence
  Description of Artificial Sequence: Synthetic peptide
  Seed: HIHIFSFTGEEMATK
HIHWFSITSEEVATK

SEQ ID NO: 281905 - protein, 15 aa, Artificial Sequence
  Description of Artificial Sequence: Synthetic peptide
  Seed: HIHIFSFTGEEMATK
HIHWFSITTEEAATK

SEQ ID NO: 281906 - protein, 15 aa, Artificial Sequence
  Description of Artificial Sequence: Synthetic peptide
  Seed: HIHIFSFTGEEMATK
HIHWFSITTEEIATK

SEQ ID NO: 281907 - protein, 15 aa, Artificial Sequence
  Description of Artificial Sequence: Synthetic peptide
  Seed: HIHIFSFTGEEMATK
HIHWFSITTEELATK

SEQ ID NO: 281908 - protein, 15 aa, Artificial Sequence
  Description of Artificial Sequence: Synthetic peptide
  Seed: HIHIFSFTGEEMATK
HIHWFSITTEEMATK

SEQ ID NO: 281909 - protein, 15 aa, Artificial Sequence
  Description of Artificial Sequence: Synthetic peptide
  Seed: HIHIFSFTGEEMATK
HIHWFSITTEENATK

SEQ ID NO: 281910 - protein, 15 aa, Artificial Sequence
  Description of Artificial Sequence: Synthetic peptide
  Seed: HIHIFSFTGEEMATK
HIHWFSITTEESATK

SEQ ID NO: 281911 - protein, 15 aa, Artificial Sequence
  Description of Artificial Sequence: Synthetic peptide
  Seed: HIHIFSFTGEEMATK
HIHWFSITTEETATK

SEQ ID NO: 281912 - protein, 15 aa, Artificial Sequence
  Description of Artificial Sequence: Synthetic peptide
  Seed: HIHIFSFTGEEMATK
HIHWFSITTEEVATK

SEQ ID NO: 281913 - protein, 15 aa, Artificial Sequence
  Description of Artificial Sequence: Synthetic peptide
  Seed: HIHIFSFTGEEMATK
HIHWFSITVEEAATK

SEQ ID NO: 281914 - protein, 15 aa, Artificial Sequence
  Description of Artificial Sequence: Synthetic peptide
  Seed: HIHIFSFTGEEMATK
HIHWFSITVEEHATK

SEQ ID NO: 281915 - protein, 15 aa, Artificial Sequence
  Description of Artificial Sequence: Synthetic peptide
  Seed: HIHIFSFTGEEMATK
HIHWFSITVEEIATK

SEQ ID NO: 281916 - protein, 15 aa, Artificial Sequence
  Description of Artificial Sequence: Synthetic peptide
  Seed: HIHIFSFTGEEMATK
HIHWFSITVEELATK

SEQ ID NO: 281917 - protein, 15 aa, Artificial Sequence
  Description of Artificial Sequence: Synthetic peptide
  Seed: HIHIFSFTGEEMATK
HIHWFSITVEEMATK

SEQ ID NO: 281918 - protein, 15 aa, Artificial Sequence
  Description of Artificial Sequence: Synthetic peptide
  Seed: HIHIFSFTGEEMATK
HIHWFSITVEENATK

SEQ ID NO: 281919 - protein, 15 aa, Artificial Sequence
  Description of Artificial Sequence: Synthetic peptide
  Seed: HIHIFSFTGEEMATK
HIHWFSITVEESATK

SEQ ID NO: 281920 - protein, 15 aa, Artificial Sequence
  Description of Artificial Sequence: Synthetic peptide
  Seed: HIHIFSFTGEEMATK
HIHWFSITVEETATK

SEQ ID NO: 281921 - protein, 15 aa, Artificial Sequence
  Description of Artificial Sequence: Synthetic peptide
  Seed: HIHIFSFTGEEMATK
HIHWFSITVEEVATK

SEQ ID NO: 281922 - protein, 15 aa, Artificial Sequence
  Description of Artificial Sequence: Synthetic peptide
  Seed: HIHIFSFTGEEMATK
HIHWFSITWEEFATK

SEQ ID NO: 281923 - protein, 15 aa, Artificial Sequence
  Description of Artificial Sequence: Synthetic peptide
  Seed: HIHIFSFTGEEMATK
HIHWFSITWEEIATK

SEQ ID NO: 281924 - protein, 15 aa, Artificial Sequence
  Description of Artificial Sequence: Synthetic peptide
  Seed: HIHIFSFTGEEMATK
HIHWFSITWEELATK

SEQ ID NO: 281925 - protein, 15 aa, Artificial Sequence
  Description of Artificial Sequence: Synthetic peptide
  Seed: HIHIFSFTGEEMATK
HIHWFSITWEEMATK

SEQ ID NO: 281926 - protein, 15 aa, Artificial Sequence
  Description of Artificial Sequence: Synthetic peptide
  Seed: HIHIFSFTGEEMATK
HIHWFSITWEEVATK

SEQ ID NO: 281927 - protein, 15 aa, Artificial Sequence
  Description of Artificial Sequence: Synthetic peptide
  Seed: HIHIFSFTGEEMATK
HIHWFSITYEEFATK

SEQ ID NO: 281928 - protein, 15 aa, Artificial Sequence
  Description of Artificial Sequence: Synthetic peptide
  Seed: HIHIFSFTGEEMATK
HIHWFSITYEEIATK

SEQ ID NO: 281929 - protein, 15 aa, Artificial Sequence
  Description of Artificial Sequence: Synthetic peptide
  Seed: HIHIFSFTGEEMATK
HIHWFSITYEELATK

SEQ ID NO: 281930 - protein, 15 aa, Artificial Sequence
  Description of Artificial Sequence: Synthetic peptide
  Seed: HIHIFSFTGEEMATK
HIHWFSITYEEMATK

SEQ ID NO: 281931 - protein, 15 aa, Artificial Sequence
  Description of Artificial Sequence: Synthetic peptide
  Seed: HIHIFSFTGEEMATK
HIHWFSITYEETATK

SEQ ID NO: 281932 - protein, 15 aa, Artificial Sequence
  Description of Artificial Sequence: Synthetic peptide
  Seed: HIHIFSFTGEEMATK
HIHWFSITYEEVATK

SEQ ID NO: 281933 - protein, 15 aa, Artificial Sequence
  Description of Artificial Sequence: Synthetic peptide
  Seed: HIHIFSFTGEEMATK
HIHWFSITYEEYATK

SEQ ID NO: 281934 - protein, 15 aa, Artificial Sequence
  Description of Artificial Sequence: Synthetic peptide
  Seed: HIHIFSFTGEEMATK
HIHWFSKTFEEFATK

SEQ ID NO: 281935 - protein, 15 aa, Artificial Sequence
  Description of Artificial Sequence: Synthetic peptide
  Seed: HIHIFSFTGEEMATK
HIHWFSKTFEEIATK

SEQ ID NO: 281936 - protein, 15 aa, Artificial Sequence
  Description of Artificial Sequence: Synthetic peptide
  Seed: HIHIFSFTGEEMATK
HIHWFSKTFEELATK

SEQ ID NO: 281937 - protein, 15 aa, Artificial Sequence
  Description of Artificial Sequence: Synthetic peptide
  Seed: HIHIFSFTGEEMATK
HIHWFSKTFEEMATK

SEQ ID NO: 281938 - protein, 15 aa, Artificial Sequence
  Description of Artificial Sequence: Synthetic peptide
  Seed: HIHIFSFTGEEMATK
HIHWFSKTFEEVATK

SEQ ID NO: 281939 - protein, 15 aa, Artificial Sequence
  Description of Artificial Sequence: Synthetic peptide
  Seed: HIHIFSFTGEEMATK
HIHWFSKTLEELATK

SEQ ID NO: 281940 - protein, 15 aa, Artificial Sequence
  Description of Artificial Sequence: Synthetic peptide
  Seed: HIHIFSFTGEEMATK
HIHWFSLTAEEAATK

SEQ ID NO: 281941 - protein, 15 aa, Artificial Sequence
  Description of Artificial Sequence: Synthetic peptide
  Seed: HIHIFSFTGEEMATK
HIHWFSLTAEEGATK

SEQ ID NO: 281942 - protein, 15 aa, Artificial Sequence
  Description of Artificial Sequence: Synthetic peptide
  Seed: HIHIFSFTGEEMATK
HIHWFSLTAEEHATK

SEQ ID NO: 281943 - protein, 15 aa, Artificial Sequence
  Description of Artificial Sequence: Synthetic peptide
  Seed: HIHIFSFTGEEMATK
HIHWFSLTAEEIATK

SEQ ID NO: 281944 - protein, 15 aa, Artificial Sequence
  Description of Artificial Sequence: Synthetic peptide
  Seed: HIHIFSFTGEEMATK
HIHWFSLTAEELATK

SEQ ID NO: 281945 - protein, 15 aa, Artificial Sequence
  Description of Artificial Sequence: Synthetic peptide
  Seed: HIHIFSFTGEEMATK
HIHWFSLTAEEMATK

SEQ ID NO: 281946 - protein, 15 aa, Artificial Sequence
  Description of Artificial Sequence: Synthetic peptide
  Seed: HIHIFSFTGEEMATK
HIHWFSLTAEENATK

SEQ ID NO: 281947 - protein, 15 aa, Artificial Sequence
  Description of Artificial Sequence: Synthetic peptide
  Seed: HIHIFSFTGEEMATK
HIHWFSLTAEEQATK

SEQ ID NO: 281948 - protein, 15 aa, Artificial Sequence
  Description of Artificial Sequence: Synthetic peptide
  Seed: HIHIFSFTGEEMATK
HIHWFSLTAEESATK

SEQ ID NO: 281949 - protein, 15 aa, Artificial Sequence
  Description of Artificial Sequence: Synthetic peptide
  Seed: HIHIFSFTGEEMATK
HIHWFSLTAEETATK

SEQ ID NO: 281950 - protein, 15 aa, Artificial Sequence
  Description of Artificial Sequence: Synthetic peptide
  Seed: HIHIFSFTGEEMATK
HIHWFSLTAEEVATK

SEQ ID NO: 281951 - protein, 15 aa, Artificial Sequence
  Description of Artificial Sequence: Synthetic peptide
  Seed: HIHIFSFTGEEMATK
HIHWFSLTFEEAATK

SEQ ID NO: 281952 - protein, 15 aa, Artificial Sequence
  Description of Artificial Sequence: Synthetic peptide
  Seed: HIHIFSFTGEEMATK
HIHWFSLTFEEDATK

SEQ ID NO: 281953 - protein, 15 aa, Artificial Sequence
  Description of Artificial Sequence: Synthetic peptide
  Seed: HIHIFSFTGEEMATK
HIHWFSLTFEEEATK

SEQ ID NO: 281954 - protein, 15 aa, Artificial Sequence
  Description of Artificial Sequence: Synthetic peptide
  Seed: HIHIFSFTGEEMATK
HIHWFSLTFEEFATK

SEQ ID NO: 281955 - protein, 15 aa, Artificial Sequence
  Description of Artificial Sequence: Synthetic peptide
  Seed: HIHIFSFTGEEMATK
HIHWFSLTFEEHATK

SEQ ID NO: 281956 - protein, 15 aa, Artificial Sequence
  Description of Artificial Sequence: Synthetic peptide
  Seed: HIHIFSFTGEEMATK
HIHWFSLTFEEIATK

SEQ ID NO: 281957 - protein, 15 aa, Artificial Sequence
  Description of Artificial Sequence: Synthetic peptide
  Seed: HIHIFSFTGEEMATK
HIHWFSLTFEELATK

SEQ ID NO: 281958 - protein, 15 aa, Artificial Sequence
  Description of Artificial Sequence: Synthetic peptide
  Seed: HIHIFSFTGEEMATK
HIHWFSLTFEEMATK

SEQ ID NO: 281959 - protein, 15 aa, Artificial Sequence
  Description of Artificial Sequence: Synthetic peptide
  Seed: HIHIFSFTGEEMATK
HIHWFSLTFEENATK

SEQ ID NO: 281960 - protein, 15 aa, Artificial Sequence
  Description of Artificial Sequence: Synthetic peptide
  Seed: HIHIFSFTGEEMATK
HIHWFSLTFEERATK

SEQ ID NO: 281961 - protein, 15 aa, Artificial Sequence
  Description of Artificial Sequence: Synthetic peptide
  Seed: HIHIFSFTGEEMATK
HIHWFSLTFEESATK

SEQ ID NO: 281962 - protein, 15 aa, Artificial Sequence
  Description of Artificial Sequence: Synthetic peptide
  Seed: HIHIFSFTGEEMATK
HIHWFSLTFEETATK

SEQ ID NO: 281963 - protein, 15 aa, Artificial Sequence
  Description of Artificial Sequence: Synthetic peptide
  Seed: HIHIFSFTGEEMATK
HIHWFSLTFEEVATK

SEQ ID NO: 281964 - protein, 15 aa, Artificial Sequence
  Description of Artificial Sequence: Synthetic peptide
  Seed: HIHIFSFTGEEMATK
HIHWFSLTFEEYATK

SEQ ID NO: 281965 - protein, 15 aa, Artificial Sequence
  Description of Artificial Sequence: Synthetic peptide
  Seed: HIHIFSFTGEEMATK
HIHWFSLTGEEAATK

SEQ ID NO: 281966 - protein, 15 aa, Artificial Sequence
  Description of Artificial Sequence: Synthetic peptide
  Seed: HIHIFSFTGEEMATK
HIHWFSLTGEEGATK

SEQ ID NO: 281967 - protein, 15 aa, Artificial Sequence
  Description of Artificial Sequence: Synthetic peptide
  Seed: HIHIFSFTGEEMATK
HIHWFSLTGEEIATK

SEQ ID NO: 281968 - protein, 15 aa, Artificial Sequence
  Description of Artificial Sequence: Synthetic peptide
  Seed: HIHIFSFTGEEMATK
HIHWFSLTGEELATK

SEQ ID NO: 281969 - protein, 15 aa, Artificial Sequence
  Description of Artificial Sequence: Synthetic peptide
  Seed: HIHIFSFTGEEMATK
HIHWFSLTGEEMATK

SEQ ID NO: 281970 - protein, 15 aa, Artificial Sequence
  Description of Artificial Sequence: Synthetic peptide
  Seed: HIHIFSFTGEEMATK
HIHWFSLTGEESATK

SEQ ID NO: 281971 - protein, 15 aa, Artificial Sequence
  Description of Artificial Sequence: Synthetic peptide
  Seed: HIHIFSFTGEEMATK
HIHWFSLTGEETATK

SEQ ID NO: 281972 - protein, 15 aa, Artificial Sequence
  Description of Artificial Sequence: Synthetic peptide
  Seed: HIHIFSFTGEEMATK
HIHWFSLTGEEVATK

SEQ ID NO: 281973 - protein, 15 aa, Artificial Sequence
  Description of Artificial Sequence: Synthetic peptide
  Seed: HIHIFSFTGEEMATK
HIHWFSLTIEEAATK

SEQ ID NO: 281974 - protein, 15 aa, Artificial Sequence
  Description of Artificial Sequence: Synthetic peptide
  Seed: HIHIFSFTGEEMATK
HIHWFSLTIEEFATK

SEQ ID NO: 281975 - protein, 15 aa, Artificial Sequence
  Description of Artificial Sequence: Synthetic peptide
  Seed: HIHIFSFTGEEMATK
HIHWFSLTIEEGATK

SEQ ID NO: 281976 - protein, 15 aa, Artificial Sequence
  Description of Artificial Sequence: Synthetic peptide
  Seed: HIHIFSFTGEEMATK
HIHWFSLTIEEHATK

SEQ ID NO: 281977 - protein, 15 aa, Artificial Sequence
  Description of Artificial Sequence: Synthetic peptide
  Seed: HIHIFSFTGEEMATK
HIHWFSLTIEEIATK

SEQ ID NO: 281978 - protein, 15 aa, Artificial Sequence
  Description of Artificial Sequence: Synthetic peptide
  Seed: HIHIFSFTGEEMATK
HIHWFSLTIEELATK

SEQ ID NO: 281979 - protein, 15 aa, Artificial Sequence
  Description of Artificial Sequence: Synthetic peptide
  Seed: HIHIFSFTGEEMATK
HIHWFSLTIEEMATK

SEQ ID NO: 281980 - protein, 15 aa, Artificial Sequence
  Description of Artificial Sequence: Synthetic peptide
  Seed: HIHIFSFTGEEMATK
HIHWFSLTIEENATK

SEQ ID NO: 281981 - protein, 15 aa, Artificial Sequence
  Description of Artificial Sequence: Synthetic peptide
  Seed: HIHIFSFTGEEMATK
HIHWFSLTIEESATK

SEQ ID NO: 281982 - protein, 15 aa, Artificial Sequence
  Description of Artificial Sequence: Synthetic peptide
  Seed: HIHIFSFTGEEMATK
HIHWFSLTIEETATK

SEQ ID NO: 281983 - protein, 15 aa, Artificial Sequence
  Description of Artificial Sequence: Synthetic peptide
  Seed: HIHIFSFTGEEMATK
HIHWFSLTIEEVATK

SEQ ID NO: 281984 - protein, 15 aa, Artificial Sequence
  Description of Artificial Sequence: Synthetic peptide
  Seed: HIHIFSFTGEEMATK
HIHWFSLTLEEAATK

SEQ ID NO: 281985 - protein, 15 aa, Artificial Sequence
  Description of Artificial Sequence: Synthetic peptide
  Seed: HIHIFSFTGEEMATK
HIHWFSLTLEEFATK

SEQ ID NO: 281986 - protein, 15 aa, Artificial Sequence
  Description of Artificial Sequence: Synthetic peptide
  Seed: HIHIFSFTGEEMATK
HIHWFSLTLEEIATK

SEQ ID NO: 281987 - protein, 15 aa, Artificial Sequence
  Description of Artificial Sequence: Synthetic peptide
  Seed: HIHIFSFTGEEMATK
HIHWFSLTLEELATK

SEQ ID NO: 281988 - protein, 15 aa, Artificial Sequence
  Description of Artificial Sequence: Synthetic peptide
  Seed: HIHIFSFTGEEMATK
HIHWFSLTLEEVATK

SEQ ID NO: 281989 - protein, 15 aa, Artificial Sequence
  Description of Artificial Sequence: Synthetic peptide
  Seed: HIHIFSFTGEEMATK
HIHWFSLTMEEAATK

SEQ ID NO: 281990 - protein, 15 aa, Artificial Sequence
  Description of Artificial Sequence: Synthetic peptide
  Seed: HIHIFSFTGEEMATK
HIHWFSLTMEEIATK

SEQ ID NO: 281991 - protein, 15 aa, Artificial Sequence
  Description of Artificial Sequence: Synthetic peptide
  Seed: HIHIFSFTGEEMATK
HIHWFSLTMEELATK

SEQ ID NO: 281992 - protein, 15 aa, Artificial Sequence
  Description of Artificial Sequence: Synthetic peptide
  Seed: HIHIFSFTGEEMATK
HIHWFSLTNEEAATK

SEQ ID NO: 281993 - protein, 15 aa, Artificial Sequence
  Description of Artificial Sequence: Synthetic peptide
  Seed: HIHIFSFTGEEMATK
HIHWFSLTNEEIATK

SEQ ID NO: 281994 - protein, 15 aa, Artificial Sequence
  Description of Artificial Sequence: Synthetic peptide
  Seed: HIHIFSFTGEEMATK
HIHWFSLTNEELATK

SEQ ID NO: 281995 - protein, 15 aa, Artificial Sequence
  Description of Artificial Sequence: Synthetic peptide
  Seed: HIHIFSFTGEEMATK
HIHWFSLTNEESATK

SEQ ID NO: 281996 - protein, 15 aa, Artificial Sequence
  Description of Artificial Sequence: Synthetic peptide
  Seed: HIHIFSFTGEEMATK
HIHWFSLTNEETATK

SEQ ID NO: 281997 - protein, 15 aa, Artificial Sequence
  Description of Artificial Sequence: Synthetic peptide
  Seed: HIHIFSFTGEEMATK
HIHWFSLTNEEVATK

SEQ ID NO: 281998 - protein, 15 aa, Artificial Sequence
  Description of Artificial Sequence: Synthetic peptide
  Seed: HIHIFSFTGEEMATK
HIHWFSLTPEEAATK

SEQ ID NO: 281999 - protein, 15 aa, Artificial Sequence
  Description of Artificial Sequence: Synthetic peptide
  Seed: HIHIFSFTGEEMATK
HIHWFSLTPEEHATK

SEQ ID NO: 282000 - protein, 15 aa, Artificial Sequence
  Description of Artificial Sequence: Synthetic peptide
  Seed: HIHIFSFTGEEMATK
HIHWFSLTPEEIATK

SEQ ID NO: 282001 - protein, 15 aa, Artificial Sequence
  Description of Artificial Sequence: Synthetic peptide
  Seed: HIHIFSFTGEEMATK
HIHWFSLTPEELATK

SEQ ID NO: 282002 - protein, 15 aa, Artificial Sequence
  Description of Artificial Sequence: Synthetic peptide
  Seed: HIHIFSFTGEEMATK
HIHWFSLTPEEMATK

SEQ ID NO: 282003 - protein, 15 aa, Artificial Sequence
  Description of Artificial Sequence: Synthetic peptide
  Seed: HIHIFSFTGEEMATK
HIHWFSLTPEENATK

SEQ ID NO: 282004 - protein, 15 aa, Artificial Sequence
  Description of Artificial Sequence: Synthetic peptide
  Seed: HIHIFSFTGEEMATK
HIHWFSLTPEESATK

SEQ ID NO: 282005 - protein, 15 aa, Artificial Sequence
  Description of Artificial Sequence: Synthetic peptide
  Seed: HIHIFSFTGEEMATK
HIHWFSLTPEETATK

SEQ ID NO: 282006 - protein, 15 aa, Artificial Sequence
  Description of Artificial Sequence: Synthetic peptide
  Seed: HIHIFSFTGEEMATK
HIHWFSLTPEEVATK

SEQ ID NO: 282007 - protein, 15 aa, Artificial Sequence
  Description of Artificial Sequence: Synthetic peptide
  Seed: HIHIFSFTGEEMATK
HIHWFSLTSEEAATK

SEQ ID NO: 282008 - protein, 15 aa, Artificial Sequence
  Description of Artificial Sequence: Synthetic peptide
  Seed: HIHIFSFTGEEMATK
HIHWFSLTSEEGATK

SEQ ID NO: 282009 - protein, 15 aa, Artificial Sequence
  Description of Artificial Sequence: Synthetic peptide
  Seed: HIHIFSFTGEEMATK
HIHWFSLTSEEHATK

SEQ ID NO: 282010 - protein, 15 aa, Artificial Sequence
  Description of Artificial Sequence: Synthetic peptide
  Seed: HIHIFSFTGEEMATK
HIHWFSLTSEEIATK

SEQ ID NO: 282011 - protein, 15 aa, Artificial Sequence
  Description of Artificial Sequence: Synthetic peptide
  Seed: HIHIFSFTGEEMATK
HIHWFSLTSEELATK

SEQ ID NO: 282012 - protein, 15 aa, Artificial Sequence
  Description of Artificial Sequence: Synthetic peptide
  Seed: HIHIFSFTGEEMATK
HIHWFSLTSEEMATK

SEQ ID NO: 282013 - protein, 15 aa, Artificial Sequence
  Description of Artificial Sequence: Synthetic peptide
  Seed: HIHIFSFTGEEMATK
HIHWFSLTSEENATK

SEQ ID NO: 282014 - protein, 15 aa, Artificial Sequence
  Description of Artificial Sequence: Synthetic peptide
  Seed: HIHIFSFTGEEMATK
HIHWFSLTSEESATK

SEQ ID NO: 282015 - protein, 15 aa, Artificial Sequence
  Description of Artificial Sequence: Synthetic peptide
  Seed: HIHIFSFTGEEMATK
HIHWFSLTSEETATK

SEQ ID NO: 282016 - protein, 15 aa, Artificial Sequence
  Description of Artificial Sequence: Synthetic peptide
  Seed: HIHIFSFTGEEMATK
HIHWFSLTSEEVATK

SEQ ID NO: 282017 - protein, 15 aa, Artificial Sequence
  Description of Artificial Sequence: Synthetic peptide
  Seed: HIHIFSFTGEEMATK
HIHWFSLTTEEAATK

SEQ ID NO: 282018 - protein, 15 aa, Artificial Sequence
  Description of Artificial Sequence: Synthetic peptide
  Seed: HIHIFSFTGEEMATK
HIHWFSLTTEEHATK

SEQ ID NO: 282019 - protein, 15 aa, Artificial Sequence
  Description of Artificial Sequence: Synthetic peptide
  Seed: HIHIFSFTGEEMATK
HIHWFSLTTEEIATK

SEQ ID NO: 282020 - protein, 15 aa, Artificial Sequence
  Description of Artificial Sequence: Synthetic peptide
  Seed: HIHIFSFTGEEMATK
HIHWFSLTTEELATK

SEQ ID NO: 282021 - protein, 15 aa, Artificial Sequence
  Description of Artificial Sequence: Synthetic peptide
  Seed: HIHIFSFTGEEMATK
HIHWFSLTTEEMATK

SEQ ID NO: 282022 - protein, 15 aa, Artificial Sequence
  Description of Artificial Sequence: Synthetic peptide
  Seed: HIHIFSFTGEEMATK
HIHWFSLTTEENATK

SEQ ID NO: 282023 - protein, 15 aa, Artificial Sequence
  Description of Artificial Sequence: Synthetic peptide
  Seed: HIHIFSFTGEEMATK
HIHWFSLTTEESATK

SEQ ID NO: 282024 - protein, 15 aa, Artificial Sequence
  Description of Artificial Sequence: Synthetic peptide
  Seed: HIHIFSFTGEEMATK
HIHWFSLTTEETATK

SEQ ID NO: 282025 - protein, 15 aa, Artificial Sequence
  Description of Artificial Sequence: Synthetic peptide
  Seed: HIHIFSFTGEEMATK
HIHWFSLTTEEVATK

SEQ ID NO: 282026 - protein, 15 aa, Artificial Sequence
  Description of Artificial Sequence: Synthetic peptide
  Seed: HIHIFSFTGEEMATK
HIHWFSLTVEEAATK

SEQ ID NO: 282027 - protein, 15 aa, Artificial Sequence
  Description of Artificial Sequence: Synthetic peptide
  Seed: HIHIFSFTGEEMATK
HIHWFSLTVEEGATK

SEQ ID NO: 282028 - protein, 15 aa, Artificial Sequence
  Description of Artificial Sequence: Synthetic peptide
  Seed: HIHIFSFTGEEMATK
HIHWFSLTVEEHATK

SEQ ID NO: 282029 - protein, 15 aa, Artificial Sequence
  Description of Artificial Sequence: Synthetic peptide
  Seed: HIHIFSFTGEEMATK
HIHWFSLTVEEIATK

SEQ ID NO: 282030 - protein, 15 aa, Artificial Sequence
  Description of Artificial Sequence: Synthetic peptide
  Seed: HIHIFSFTGEEMATK
HIHWFSLTVEELATK

SEQ ID NO: 282031 - protein, 15 aa, Artificial Sequence
  Description of Artificial Sequence: Synthetic peptide
  Seed: HIHIFSFTGEEMATK
HIHWFSLTVEEMATK

SEQ ID NO: 282032 - protein, 15 aa, Artificial Sequence
  Description of Artificial Sequence: Synthetic peptide
  Seed: HIHIFSFTGEEMATK
HIHWFSLTVEENATK

SEQ ID NO: 282033 - protein, 15 aa, Artificial Sequence
  Description of Artificial Sequence: Synthetic peptide
  Seed: HIHIFSFTGEEMATK
HIHWFSLTVEESATK

SEQ ID NO: 282034 - protein, 15 aa, Artificial Sequence
  Description of Artificial Sequence: Synthetic peptide
  Seed: HIHIFSFTGEEMATK
HIHWFSLTVEETATK

SEQ ID NO: 282035 - protein, 15 aa, Artificial Sequence
  Description of Artificial Sequence: Synthetic peptide
  Seed: HIHIFSFTGEEMATK
HIHWFSLTVEEVATK

SEQ ID NO: 282036 - protein, 15 aa, Artificial Sequence
  Description of Artificial Sequence: Synthetic peptide
  Seed: HIHIFSFTGEEMATK
HIHWFSLTWEEFATK

SEQ ID NO: 282037 - protein, 15 aa, Artificial Sequence
  Description of Artificial Sequence: Synthetic peptide
  Seed: HIHIFSFTGEEMATK
HIHWFSLTWEEIATK

SEQ ID NO: 282038 - protein, 15 aa, Artificial Sequence
  Description of Artificial Sequence: Synthetic peptide
  Seed: HIHIFSFTGEEMATK
HIHWFSLTWEELATK

SEQ ID NO: 282039 - protein, 15 aa, Artificial Sequence
  Description of Artificial Sequence: Synthetic peptide
  Seed: HIHIFSFTGEEMATK
HIHWFSLTWEEVATK

SEQ ID NO: 282040 - protein, 15 aa, Artificial Sequence
  Description of Artificial Sequence: Synthetic peptide
  Seed: HIHIFSFTGEEMATK
HIHWFSLTYEEFATK

SEQ ID NO: 282041 - protein, 15 aa, Artificial Sequence
  Description of Artificial Sequence: Synthetic peptide
  Seed: HIHIFSFTGEEMATK
HIHWFSLTYEEIATK

SEQ ID NO: 282042 - protein, 15 aa, Artificial Sequence
  Description of Artificial Sequence: Synthetic peptide
  Seed: HIHIFSFTGEEMATK
HIHWFSLTYEELATK

SEQ ID NO: 282043 - protein, 15 aa, Artificial Sequence
  Description of Artificial Sequence: Synthetic peptide
  Seed: HIHIFSFTGEEMATK
HIHWFSLTYEEMATK

SEQ ID NO: 282044 - protein, 15 aa, Artificial Sequence
  Description of Artificial Sequence: Synthetic peptide
  Seed: HIHIFSFTGEEMATK
HIHWFSLTYEEVATK

SEQ ID NO: 282045 - protein, 15 aa, Artificial Sequence
  Description of Artificial Sequence: Synthetic peptide
  Seed: HIHIFSFTGEEMATK
HIHWFSMTAEEAATK

SEQ ID NO: 282046 - protein, 15 aa, Artificial Sequence
  Description of Artificial Sequence: Synthetic peptide
  Seed: HIHIFSFTGEEMATK
HIHWFSMTAEEGATK

SEQ ID NO: 282047 - protein, 15 aa, Artificial Sequence
  Description of Artificial Sequence: Synthetic peptide
  Seed: HIHIFSFTGEEMATK
HIHWFSMTAEEHATK

SEQ ID NO: 282048 - protein, 15 aa, Artificial Sequence
  Description of Artificial Sequence: Synthetic peptide
  Seed: HIHIFSFTGEEMATK
HIHWFSMTAEEIATK

SEQ ID NO: 282049 - protein, 15 aa, Artificial Sequence
  Description of Artificial Sequence: Synthetic peptide
  Seed: HIHIFSFTGEEMATK
HIHWFSMTAEELATK

SEQ ID NO: 282050 - protein, 15 aa, Artificial Sequence
  Description of Artificial Sequence: Synthetic peptide
  Seed: HIHIFSFTGEEMATK
HIHWFSMTAEEMATK

SEQ ID NO: 282051 - protein, 15 aa, Artificial Sequence
  Description of Artificial Sequence: Synthetic peptide
  Seed: HIHIFSFTGEEMATK
HIHWFSMTAEENATK

SEQ ID NO: 282052 - protein, 15 aa, Artificial Sequence
  Description of Artificial Sequence: Synthetic peptide
  Seed: HIHIFSFTGEEMATK
HIHWFSMTAEEQATK

SEQ ID NO: 282053 - protein, 15 aa, Artificial Sequence
  Description of Artificial Sequence: Synthetic peptide
  Seed: HIHIFSFTGEEMATK
HIHWFSMTAEESATK

SEQ ID NO: 282054 - protein, 15 aa, Artificial Sequence
  Description of Artificial Sequence: Synthetic peptide
  Seed: HIHIFSFTGEEMATK
HIHWFSMTAEETATK

SEQ ID NO: 282055 - protein, 15 aa, Artificial Sequence
  Description of Artificial Sequence: Synthetic peptide
  Seed: HIHIFSFTGEEMATK
HIHWFSMTAEEVATK

SEQ ID NO: 282056 - protein, 15 aa, Artificial Sequence
  Description of Artificial Sequence: Synthetic peptide
  Seed: HIHIFSFTGEEMATK
HIHWFSMTFEEAATK

SEQ ID NO: 282057 - protein, 15 aa, Artificial Sequence
  Description of Artificial Sequence: Synthetic peptide
  Seed: HIHIFSFTGEEMATK
HIHWFSMTFEEEATK

SEQ ID NO: 282058 - protein, 15 aa, Artificial Sequence
  Description of Artificial Sequence: Synthetic peptide
  Seed: HIHIFSFTGEEMATK
HIHWFSMTFEEFATK

SEQ ID NO: 282059 - protein, 15 aa, Artificial Sequence
  Description of Artificial Sequence: Synthetic peptide
  Seed: HIHIFSFTGEEMATK
HIHWFSMTFEEIATK

SEQ ID NO: 282060 - protein, 15 aa, Artificial Sequence
  Description of Artificial Sequence: Synthetic peptide
  Seed: HIHIFSFTGEEMATK
HIHWFSMTFEELATK

SEQ ID NO: 282061 - protein, 15 aa, Artificial Sequence
  Description of Artificial Sequence: Synthetic peptide
  Seed: HIHIFSFTGEEMATK
HIHWFSMTFEEMATK

SEQ ID NO: 282062 - protein, 15 aa, Artificial Sequence
  Description of Artificial Sequence: Synthetic peptide
  Seed: HIHIFSFTGEEMATK
HIHWFSMTFEENATK

SEQ ID NO: 282063 - protein, 15 aa, Artificial Sequence
  Description of Artificial Sequence: Synthetic peptide
  Seed: HIHIFSFTGEEMATK
HIHWFSMTFEESATK

SEQ ID NO: 282064 - protein, 15 aa, Artificial Sequence
  Description of Artificial Sequence: Synthetic peptide
  Seed: HIHIFSFTGEEMATK
HIHWFSMTFEETATK

SEQ ID NO: 282065 - protein, 15 aa, Artificial Sequence
  Description of Artificial Sequence: Synthetic peptide
  Seed: HIHIFSFTGEEMATK
HIHWFSMTFEEVATK

SEQ ID NO: 282066 - protein, 15 aa, Artificial Sequence
  Description of Artificial Sequence: Synthetic peptide
  Seed: HIHIFSFTGEEMATK
HIHWFSMTFEEYATK

SEQ ID NO: 282067 - protein, 15 aa, Artificial Sequence
  Description of Artificial Sequence: Synthetic peptide
  Seed: HIHIFSFTGEEMATK
HIHWFSMTGEEAATK

SEQ ID NO: 282068 - protein, 15 aa, Artificial Sequence
  Description of Artificial Sequence: Synthetic peptide
  Seed: HIHIFSFTGEEMATK
HIHWFSMTGEEIATK

SEQ ID NO: 282069 - protein, 15 aa, Artificial Sequence
  Description of Artificial Sequence: Synthetic peptide
  Seed: HIHIFSFTGEEMATK
HIHWFSMTGEELATK

SEQ ID NO: 282070 - protein, 15 aa, Artificial Sequence
  Description of Artificial Sequence: Synthetic peptide
  Seed: HIHIFSFTGEEMATK
HIHWFSMTGEEMATK

SEQ ID NO: 282071 - protein, 15 aa, Artificial Sequence
  Description of Artificial Sequence: Synthetic peptide
  Seed: HIHIFSFTGEEMATK
HIHWFSMTGEESATK

SEQ ID NO: 282072 - protein, 15 aa, Artificial Sequence
  Description of Artificial Sequence: Synthetic peptide
  Seed: HIHIFSFTGEEMATK
HIHWFSMTGEETATK

SEQ ID NO: 282073 - protein, 15 aa, Artificial Sequence
  Description of Artificial Sequence: Synthetic peptide
  Seed: HIHIFSFTGEEMATK
HIHWFSMTGEEVATK

SEQ ID NO: 282074 - protein, 15 aa, Artificial Sequence
  Description of Artificial Sequence: Synthetic peptide
  Seed: HIHIFSFTGEEMATK
HIHWFSMTIEEAATK

SEQ ID NO: 282075 - protein, 15 aa, Artificial Sequence
  Description of Artificial Sequence: Synthetic peptide
  Seed: HIHIFSFTGEEMATK
HIHWFSMTIEEHATK

SEQ ID NO: 282076 - protein, 15 aa, Artificial Sequence
  Description of Artificial Sequence: Synthetic peptide
  Seed: HIHIFSFTGEEMATK
HIHWFSMTIEEIATK

SEQ ID NO: 282077 - protein, 15 aa, Artificial Sequence
  Description of Artificial Sequence: Synthetic peptide
  Seed: HIHIFSFTGEEMATK
HIHWFSMTIEELATK

SEQ ID NO: 282078 - protein, 15 aa, Artificial Sequence
  Description of Artificial Sequence: Synthetic peptide
  Seed: HIHIFSFTGEEMATK
HIHWFSMTIEEMATK

SEQ ID NO: 282079 - protein, 15 aa, Artificial Sequence
  Description of Artificial Sequence: Synthetic peptide
  Seed: HIHIFSFTGEEMATK
HIHWFSMTIEENATK

SEQ ID NO: 282080 - protein, 15 aa, Artificial Sequence
  Description of Artificial Sequence: Synthetic peptide
  Seed: HIHIFSFTGEEMATK
HIHWFSMTIEESATK

SEQ ID NO: 282081 - protein, 15 aa, Artificial Sequence
  Description of Artificial Sequence: Synthetic peptide
  Seed: HIHIFSFTGEEMATK
HIHWFSMTIEETATK

SEQ ID NO: 282082 - protein, 15 aa, Artificial Sequence
  Description of Artificial Sequence: Synthetic peptide
  Seed: HIHIFSFTGEEMATK
HIHWFSMTIEEVATK

SEQ ID NO: 282083 - protein, 15 aa, Artificial Sequence
  Description of Artificial Sequence: Synthetic peptide
  Seed: HIHIFSFTGEEMATK
HIHWFSMTLEEAATK

SEQ ID NO: 282084 - protein, 15 aa, Artificial Sequence
  Description of Artificial Sequence: Synthetic peptide
  Seed: HIHIFSFTGEEMATK
HIHWFSMTLEEFATK

SEQ ID NO: 282085 - protein, 15 aa, Artificial Sequence
  Description of Artificial Sequence: Synthetic peptide
  Seed: HIHIFSFTGEEMATK
HIHWFSMTLEEIATK

SEQ ID NO: 282086 - protein, 15 aa, Artificial Sequence
  Description of Artificial Sequence: Synthetic peptide
  Seed: HIHIFSFTGEEMATK
HIHWFSMTLEELATK

SEQ ID NO: 282087 - protein, 15 aa, Artificial Sequence
  Description of Artificial Sequence: Synthetic peptide
  Seed: HIHIFSFTGEEMATK
HIHWFSMTMEEAATK

SEQ ID NO: 282088 - protein, 15 aa, Artificial Sequence
  Description of Artificial Sequence: Synthetic peptide
  Seed: HIHIFSFTGEEMATK
HIHWFSMTNEEAATK

SEQ ID NO: 282089 - protein, 15 aa, Artificial Sequence
  Description of Artificial Sequence: Synthetic peptide
  Seed: HIHIFSFTGEEMATK
HIHWFSMTNEEIATK

SEQ ID NO: 282090 - protein, 15 aa, Artificial Sequence
  Description of Artificial Sequence: Synthetic peptide
  Seed: HIHIFSFTGEEMATK
HIHWFSMTNEELATK

SEQ ID NO: 282091 - protein, 15 aa, Artificial Sequence
  Description of Artificial Sequence: Synthetic peptide
  Seed: HIHIFSFTGEEMATK
HIHWFSMTNEESATK

SEQ ID NO: 282092 - protein, 15 aa, Artificial Sequence
  Description of Artificial Sequence: Synthetic peptide
  Seed: HIHIFSFTGEEMATK
HIHWFSMTNEEVATK

SEQ ID NO: 282093 - protein, 15 aa, Artificial Sequence
  Description of Artificial Sequence: Synthetic peptide
  Seed: HIHIFSFTGEEMATK
HIHWFSMTPEEAATK

SEQ ID NO: 282094 - protein, 15 aa, Artificial Sequence
  Description of Artificial Sequence: Synthetic peptide
  Seed: HIHIFSFTGEEMATK
HIHWFSMTPEEHATK

SEQ ID NO: 282095 - protein, 15 aa, Artificial Sequence
  Description of Artificial Sequence: Synthetic peptide
  Seed: HIHIFSFTGEEMATK
HIHWFSMTPEEIATK

SEQ ID NO: 282096 - protein, 15 aa, Artificial Sequence
  Description of Artificial Sequence: Synthetic peptide
  Seed: HIHIFSFTGEEMATK
HIHWFSMTPEELATK

SEQ ID NO: 282097 - protein, 15 aa, Artificial Sequence
  Description of Artificial Sequence: Synthetic peptide
  Seed: HIHIFSFTGEEMATK
HIHWFSMTPEEMATK

SEQ ID NO: 282098 - protein, 15 aa, Artificial Sequence
  Description of Artificial Sequence: Synthetic peptide
  Seed: HIHIFSFTGEEMATK
HIHWFSMTPEENATK

SEQ ID NO: 282099 - protein, 15 aa, Artificial Sequence
  Description of Artificial Sequence: Synthetic peptide
  Seed: HIHIFSFTGEEMATK
HIHWFSMTPEESATK

SEQ ID NO: 282100 - protein, 15 aa, Artificial Sequence
  Description of Artificial Sequence: Synthetic peptide
  Seed: HIHIFSFTGEEMATK
HIHWFSMTPEETATK

SEQ ID NO: 282101 - protein, 15 aa, Artificial Sequence
  Description of Artificial Sequence: Synthetic peptide
  Seed: HIHIFSFTGEEMATK
HIHWFSMTPEEVATK

SEQ ID NO: 282102 - protein, 15 aa, Artificial Sequence
  Description of Artificial Sequence: Synthetic peptide
  Seed: HIHIFSFTGEEMATK
HIHWFSMTSEEAATK

SEQ ID NO: 282103 - protein, 15 aa, Artificial Sequence
  Description of Artificial Sequence: Synthetic peptide
  Seed: HIHIFSFTGEEMATK
HIHWFSMTSEEHATK

SEQ ID NO: 282104 - protein, 15 aa, Artificial Sequence
  Description of Artificial Sequence: Synthetic peptide
  Seed: HIHIFSFTGEEMATK
HIHWFSMTSEEIATK

SEQ ID NO: 282105 - protein, 15 aa, Artificial Sequence
  Description of Artificial Sequence: Synthetic peptide
  Seed: HIHIFSFTGEEMATK
HIHWFSMTSEELATK

SEQ ID NO: 282106 - protein, 15 aa, Artificial Sequence
  Description of Artificial Sequence: Synthetic peptide
  Seed: HIHIFSFTGEEMATK
HIHWFSMTSEEMATK

SEQ ID NO: 282107 - protein, 15 aa, Artificial Sequence
  Description of Artificial Sequence: Synthetic peptide
  Seed: HIHIFSFTGEEMATK
HIHWFSMTSEENATK

SEQ ID NO: 282108 - protein, 15 aa, Artificial Sequence
  Description of Artificial Sequence: Synthetic peptide
  Seed: HIHIFSFTGEEMATK
HIHWFSMTSEESATK

SEQ ID NO: 282109 - protein, 15 aa, Artificial Sequence
  Description of Artificial Sequence: Synthetic peptide
  Seed: HIHIFSFTGEEMATK
HIHWFSMTSEETATK

SEQ ID NO: 282110 - protein, 15 aa, Artificial Sequence
  Description of Artificial Sequence: Synthetic peptide
  Seed: HIHIFSFTGEEMATK
HIHWFSMTSEEVATK

SEQ ID NO: 282111 - protein, 15 aa, Artificial Sequence
  Description of Artificial Sequence: Synthetic peptide
  Seed: HIHIFSFTGEEMATK
HIHWFSMTTEEAATK

SEQ ID NO: 282112 - protein, 15 aa, Artificial Sequence
  Description of Artificial Sequence: Synthetic peptide
  Seed: HIHIFSFTGEEMATK
HIHWFSMTTEEHATK

SEQ ID NO: 282113 - protein, 15 aa, Artificial Sequence
  Description of Artificial Sequence: Synthetic peptide
  Seed: HIHIFSFTGEEMATK
HIHWFSMTTEEIATK

SEQ ID NO: 282114 - protein, 15 aa, Artificial Sequence
  Description of Artificial Sequence: Synthetic peptide
  Seed: HIHIFSFTGEEMATK
HIHWFSMTTEELATK

SEQ ID NO: 282115 - protein, 15 aa, Artificial Sequence
  Description of Artificial Sequence: Synthetic peptide
  Seed: HIHIFSFTGEEMATK
HIHWFSMTTEEMATK

SEQ ID NO: 282116 - protein, 15 aa, Artificial Sequence
  Description of Artificial Sequence: Synthetic peptide
  Seed: HIHIFSFTGEEMATK
HIHWFSMTTEENATK

SEQ ID NO: 282117 - protein, 15 aa, Artificial Sequence
  Description of Artificial Sequence: Synthetic peptide
  Seed: HIHIFSFTGEEMATK
HIHWFSMTTEESATK

SEQ ID NO: 282118 - protein, 15 aa, Artificial Sequence
  Description of Artificial Sequence: Synthetic peptide
  Seed: HIHIFSFTGEEMATK
HIHWFSMTTEETATK

SEQ ID NO: 282119 - protein, 15 aa, Artificial Sequence
  Description of Artificial Sequence: Synthetic peptide
  Seed: HIHIFSFTGEEMATK
HIHWFSMTTEEVATK

SEQ ID NO: 282120 - protein, 15 aa, Artificial Sequence
  Description of Artificial Sequence: Synthetic peptide
  Seed: HIHIFSFTGEEMATK
HIHWFSMTVEEAATK

SEQ ID NO: 282121 - protein, 15 aa, Artificial Sequence
  Description of Artificial Sequence: Synthetic peptide
  Seed: HIHIFSFTGEEMATK
HIHWFSMTVEEGATK

SEQ ID NO: 282122 - protein, 15 aa, Artificial Sequence
  Description of Artificial Sequence: Synthetic peptide
  Seed: HIHIFSFTGEEMATK
HIHWFSMTVEEHATK

SEQ ID NO: 282123 - protein, 15 aa, Artificial Sequence
  Description of Artificial Sequence: Synthetic peptide
  Seed: HIHIFSFTGEEMATK
HIHWFSMTVEEIATK

SEQ ID NO: 282124 - protein, 15 aa, Artificial Sequence
  Description of Artificial Sequence: Synthetic peptide
  Seed: HIHIFSFTGEEMATK
HIHWFSMTVEELATK

SEQ ID NO: 282125 - protein, 15 aa, Artificial Sequence
  Description of Artificial Sequence: Synthetic peptide
  Seed: HIHIFSFTGEEMATK
HIHWFSMTVEEMATK

SEQ ID NO: 282126 - protein, 15 aa, Artificial Sequence
  Description of Artificial Sequence: Synthetic peptide
  Seed: HIHIFSFTGEEMATK
HIHWFSMTVEENATK

SEQ ID NO: 282127 - protein, 15 aa, Artificial Sequence
  Description of Artificial Sequence: Synthetic peptide
  Seed: HIHIFSFTGEEMATK
HIHWFSMTVEEQATK

SEQ ID NO: 282128 - protein, 15 aa, Artificial Sequence
  Description of Artificial Sequence: Synthetic peptide
  Seed: HIHIFSFTGEEMATK
HIHWFSMTVEESATK

SEQ ID NO: 282129 - protein, 15 aa, Artificial Sequence
  Description of Artificial Sequence: Synthetic peptide
  Seed: HIHIFSFTGEEMATK
HIHWFSMTVEETATK

SEQ ID NO: 282130 - protein, 15 aa, Artificial Sequence
  Description of Artificial Sequence: Synthetic peptide
  Seed: HIHIFSFTGEEMATK
HIHWFSMTVEEVATK

SEQ ID NO: 282131 - protein, 15 aa, Artificial Sequence
  Description of Artificial Sequence: Synthetic peptide
  Seed: HIHIFSFTGEEMATK
HIHWFSMTWEEIATK

SEQ ID NO: 282132 - protein, 15 aa, Artificial Sequence
  Description of Artificial Sequence: Synthetic peptide
  Seed: HIHIFSFTGEEMATK
HIHWFSMTWEELATK

SEQ ID NO: 282133 - protein, 15 aa, Artificial Sequence
  Description of Artificial Sequence: Synthetic peptide
  Seed: HIHIFSFTGEEMATK
HIHWFSMTYEEFATK

SEQ ID NO: 282134 - protein, 15 aa, Artificial Sequence
  Description of Artificial Sequence: Synthetic peptide
  Seed: HIHIFSFTGEEMATK
HIHWFSMTYEEIATK

SEQ ID NO: 282135 - protein, 15 aa, Artificial Sequence
  Description of Artificial Sequence: Synthetic peptide
  Seed: HIHIFSFTGEEMATK
HIHWFSMTYEELATK

SEQ ID NO: 282136 - protein, 15 aa, Artificial Sequence
  Description of Artificial Sequence: Synthetic peptide
  Seed: HIHIFSFTGEEMATK
HIHWFSMTYEEVATK

SEQ ID NO: 282137 - protein, 15 aa, Artificial Sequence
  Description of Artificial Sequence: Synthetic peptide
  Seed: HIHIFSFTGEEMATK
HIHWFSNTFEEFATK

SEQ ID NO: 282138 - protein, 15 aa, Artificial Sequence
  Description of Artificial Sequence: Synthetic peptide
  Seed: HIHIFSFTGEEMATK
HIHWFSNTFEEIATK

SEQ ID NO: 282139 - protein, 15 aa, Artificial Sequence
  Description of Artificial Sequence: Synthetic peptide
  Seed: HIHIFSFTGEEMATK
HIHWFSNTFEELATK

SEQ ID NO: 282140 - protein, 15 aa, Artificial Sequence
  Description of Artificial Sequence: Synthetic peptide
  Seed: HIHIFSFTGEEMATK
HIHWFSNTFEEMATK

SEQ ID NO: 282141 - protein, 15 aa, Artificial Sequence
  Description of Artificial Sequence: Synthetic peptide
  Seed: HIHIFSFTGEEMATK
HIHWFSNTFEEVATK

SEQ ID NO: 282142 - protein, 15 aa, Artificial Sequence
  Description of Artificial Sequence: Synthetic peptide
  Seed: HIHIFSFTGEEMATK
HIHWFSQTAEEAATK

SEQ ID NO: 282143 - protein, 15 aa, Artificial Sequence
  Description of Artificial Sequence: Synthetic peptide
  Seed: HIHIFSFTGEEMATK
HIHWFSQTAEEIATK

SEQ ID NO: 282144 - protein, 15 aa, Artificial Sequence
  Description of Artificial Sequence: Synthetic peptide
  Seed: HIHIFSFTGEEMATK
HIHWFSQTAEELATK

SEQ ID NO: 282145 - protein, 15 aa, Artificial Sequence
  Description of Artificial Sequence: Synthetic peptide
  Seed: HIHIFSFTGEEMATK
HIHWFSQTAEEVATK

SEQ ID NO: 282146 - protein, 15 aa, Artificial Sequence
  Description of Artificial Sequence: Synthetic peptide
  Seed: HIHIFSFTGEEMATK
HIHWFSQTFEEAATK

SEQ ID NO: 282147 - protein, 15 aa, Artificial Sequence
  Description of Artificial Sequence: Synthetic peptide
  Seed: HIHIFSFTGEEMATK
HIHWFSQTFEEFATK

SEQ ID NO: 282148 - protein, 15 aa, Artificial Sequence
  Description of Artificial Sequence: Synthetic peptide
  Seed: HIHIFSFTGEEMATK
HIHWFSQTFEEIATK

SEQ ID NO: 282149 - protein, 15 aa, Artificial Sequence
  Description of Artificial Sequence: Synthetic peptide
  Seed: HIHIFSFTGEEMATK
HIHWFSQTFEELATK

SEQ ID NO: 282150 - protein, 15 aa, Artificial Sequence
  Description of Artificial Sequence: Synthetic peptide
  Seed: HIHIFSFTGEEMATK
HIHWFSQTFEEMATK

SEQ ID NO: 282151 - protein, 15 aa, Artificial Sequence
  Description of Artificial Sequence: Synthetic peptide
  Seed: HIHIFSFTGEEMATK
HIHWFSQTFEETATK

SEQ ID NO: 282152 - protein, 15 aa, Artificial Sequence
  Description of Artificial Sequence: Synthetic peptide
  Seed: HIHIFSFTGEEMATK
HIHWFSQTFEEVATK

SEQ ID NO: 282153 - protein, 15 aa, Artificial Sequence
  Description of Artificial Sequence: Synthetic peptide
  Seed: HIHIFSFTGEEMATK
HIHWFSQTFEEYATK

SEQ ID NO: 282154 - protein, 15 aa, Artificial Sequence
  Description of Artificial Sequence: Synthetic peptide
  Seed: HIHIFSFTGEEMATK
HIHWFSQTLEELATK

SEQ ID NO: 282155 - protein, 15 aa, Artificial Sequence
  Description of Artificial Sequence: Synthetic peptide
  Seed: HIHIFSFTGEEMATK
HIHWFSQTSEELATK

SEQ ID NO: 282156 - protein, 15 aa, Artificial Sequence
  Description of Artificial Sequence: Synthetic peptide
  Seed: HIHIFSFTGEEMATK
HIHWFSQTSEEVATK

SEQ ID NO: 282157 - protein, 15 aa, Artificial Sequence
  Description of Artificial Sequence: Synthetic peptide
  Seed: HIHIFSFTGEEMATK
HIHWFSQTYEEIATK

SEQ ID NO: 282158 - protein, 15 aa, Artificial Sequence
  Description of Artificial Sequence: Synthetic peptide
  Seed: HIHIFSFTGEEMATK
HIHWFSQTYEELATK

SEQ ID NO: 282159 - protein, 15 aa, Artificial Sequence
  Description of Artificial Sequence: Synthetic peptide
  Seed: HIHIFSFTGEEMATK
HIHWFSRTFEEFATK

SEQ ID NO: 282160 - protein, 15 aa, Artificial Sequence
  Description of Artificial Sequence: Synthetic peptide
  Seed: HIHIFSFTGEEMATK
HIHWFSRTFEEIATK

SEQ ID NO: 282161 - protein, 15 aa, Artificial Sequence
  Description of Artificial Sequence: Synthetic peptide
  Seed: HIHIFSFTGEEMATK
HIHWFSRTFEELATK

SEQ ID NO: 282162 - protein, 15 aa, Artificial Sequence
  Description of Artificial Sequence: Synthetic peptide
  Seed: HIHIFSFTGEEMATK
HIHWFSRTFEEVATK

SEQ ID NO: 282163 - protein, 15 aa, Artificial Sequence
  Description of Artificial Sequence: Synthetic peptide
  Seed: HIHIFSFTGEEMATK
HIHWFSSTFEEAATK

SEQ ID NO: 282164 - protein, 15 aa, Artificial Sequence
  Description of Artificial Sequence: Synthetic peptide
  Seed: HIHIFSFTGEEMATK
HIHWFSSTFEEDATK

SEQ ID NO: 282165 - protein, 15 aa, Artificial Sequence
  Description of Artificial Sequence: Synthetic peptide
  Seed: HIHIFSFTGEEMATK
HIHWFSSTFEEEATK

SEQ ID NO: 282166 - protein, 15 aa, Artificial Sequence
  Description of Artificial Sequence: Synthetic peptide
  Seed: HIHIFSFTGEEMATK
HIHWFSSTFEEFATK

SEQ ID NO: 282167 - protein, 15 aa, Artificial Sequence
  Description of Artificial Sequence: Synthetic peptide
  Seed: HIHIFSFTGEEMATK
HIHWFSSTFEEIATK

SEQ ID NO: 282168 - protein, 15 aa, Artificial Sequence
  Description of Artificial Sequence: Synthetic peptide
  Seed: HIHIFSFTGEEMATK
HIHWFSSTFEELATK

SEQ ID NO: 282169 - protein, 15 aa, Artificial Sequence
  Description of Artificial Sequence: Synthetic peptide
  Seed: HIHIFSFTGEEMATK
HIHWFSSTFEEMATK

SEQ ID NO: 282170 - protein, 15 aa, Artificial Sequence
  Description of Artificial Sequence: Synthetic peptide
  Seed: HIHIFSFTGEEMATK
HIHWFSSTFEENATK

SEQ ID NO: 282171 - protein, 15 aa, Artificial Sequence
  Description of Artificial Sequence: Synthetic peptide
  Seed: HIHIFSFTGEEMATK
HIHWFSSTFEESATK

SEQ ID NO: 282172 - protein, 15 aa, Artificial Sequence
  Description of Artificial Sequence: Synthetic peptide
  Seed: HIHIFSFTGEEMATK
HIHWFSSTFEETATK

SEQ ID NO: 282173 - protein, 15 aa, Artificial Sequence
  Description of Artificial Sequence: Synthetic peptide
  Seed: HIHIFSFTGEEMATK
HIHWFSSTFEEVATK

SEQ ID NO: 282174 - protein, 15 aa, Artificial Sequence
  Description of Artificial Sequence: Synthetic peptide
  Seed: HIHIFSFTGEEMATK
HIHWFSSTFEEWATK

SEQ ID NO: 282175 - protein, 15 aa, Artificial Sequence
  Description of Artificial Sequence: Synthetic peptide
  Seed: HIHIFSFTGEEMATK
HIHWFSSTFEEYATK

SEQ ID NO: 282176 - protein, 15 aa, Artificial Sequence
  Description of Artificial Sequence: Synthetic peptide
  Seed: HIHIFSFTGEEMATK
HIHWFSSTIEEIATK

SEQ ID NO: 282177 - protein, 15 aa, Artificial Sequence
  Description of Artificial Sequence: Synthetic peptide
  Seed: HIHIFSFTGEEMATK
HIHWFSSTIEELATK

SEQ ID NO: 282178 - protein, 15 aa, Artificial Sequence
  Description of Artificial Sequence: Synthetic peptide
  Seed: HIHIFSFTGEEMATK
HIHWFSSTLEEFATK

SEQ ID NO: 282179 - protein, 15 aa, Artificial Sequence
  Description of Artificial Sequence: Synthetic peptide
  Seed: HIHIFSFTGEEMATK
HIHWFSSTLEEIATK

SEQ ID NO: 282180 - protein, 15 aa, Artificial Sequence
  Description of Artificial Sequence: Synthetic peptide
  Seed: HIHIFSFTGEEMATK
HIHWFSSTLEELATK

SEQ ID NO: 282181 - protein, 15 aa, Artificial Sequence
  Description of Artificial Sequence: Synthetic peptide
  Seed: HIHIFSFTGEEMATK
HIHWFSSTLEEVATK

SEQ ID NO: 282182 - protein, 15 aa, Artificial Sequence
  Description of Artificial Sequence: Synthetic peptide
  Seed: HIHIFSFTGEEMATK
HIHWFSSTMEELATK

SEQ ID NO: 282183 - protein, 15 aa, Artificial Sequence
  Description of Artificial Sequence: Synthetic peptide
  Seed: HIHIFSFTGEEMATK
HIHWFSSTWEEFATK

SEQ ID NO: 282184 - protein, 15 aa, Artificial Sequence
  Description of Artificial Sequence: Synthetic peptide
  Seed: HIHIFSFTGEEMATK
HIHWFSSTWEEIATK

SEQ ID NO: 282185 - protein, 15 aa, Artificial Sequence
  Description of Artificial Sequence: Synthetic peptide
  Seed: HIHIFSFTGEEMATK
HIHWFSSTWEELATK

SEQ ID NO: 282186 - protein, 15 aa, Artificial Sequence
  Description of Artificial Sequence: Synthetic peptide
  Seed: HIHIFSFTGEEMATK
HIHWFSSTWEEVATK

SEQ ID NO: 282187 - protein, 15 aa, Artificial Sequence
  Description of Artificial Sequence: Synthetic peptide
  Seed: HIHIFSFTGEEMATK
HIHWFSSTYEEFATK

SEQ ID NO: 282188 - protein, 15 aa, Artificial Sequence
  Description of Artificial Sequence: Synthetic peptide
  Seed: HIHIFSFTGEEMATK
HIHWFSSTYEEIATK

SEQ ID NO: 282189 - protein, 15 aa, Artificial Sequence
  Description of Artificial Sequence: Synthetic peptide
  Seed: HIHIFSFTGEEMATK
HIHWFSSTYEELATK

SEQ ID NO: 282190 - protein, 15 aa, Artificial Sequence
  Description of Artificial Sequence: Synthetic peptide
  Seed: HIHIFSFTGEEMATK
HIHWFSSTYEEMATK

SEQ ID NO: 282191 - protein, 15 aa, Artificial Sequence
  Description of Artificial Sequence: Synthetic peptide
  Seed: HIHIFSFTGEEMATK
HIHWFSSTYEEVATK

SEQ ID NO: 282192 - protein, 15 aa, Artificial Sequence
  Description of Artificial Sequence: Synthetic peptide
  Seed: HIHIFSFTGEEMATK
HIHWFSTTFEEAATK

SEQ ID NO: 282193 - protein, 15 aa, Artificial Sequence
  Description of Artificial Sequence: Synthetic peptide
  Seed: HIHIFSFTGEEMATK
HIHWFSTTFEEDATK

SEQ ID NO: 282194 - protein, 15 aa, Artificial Sequence
  Description of Artificial Sequence: Synthetic peptide
  Seed: HIHIFSFTGEEMATK
HIHWFSTTFEEEATK

SEQ ID NO: 282195 - protein, 15 aa, Artificial Sequence
  Description of Artificial Sequence: Synthetic peptide
  Seed: HIHIFSFTGEEMATK
HIHWFSTTFEEFATK

SEQ ID NO: 282196 - protein, 15 aa, Artificial Sequence
  Description of Artificial Sequence: Synthetic peptide
  Seed: HIHIFSFTGEEMATK
HIHWFSTTFEEHATK

SEQ ID NO: 282197 - protein, 15 aa, Artificial Sequence
  Description of Artificial Sequence: Synthetic peptide
  Seed: HIHIFSFTGEEMATK
HIHWFSTTFEEIATK

SEQ ID NO: 282198 - protein, 15 aa, Artificial Sequence
  Description of Artificial Sequence: Synthetic peptide
  Seed: HIHIFSFTGEEMATK
HIHWFSTTFEELATK

SEQ ID NO: 282199 - protein, 15 aa, Artificial Sequence
  Description of Artificial Sequence: Synthetic peptide
  Seed: HIHIFSFTGEEMATK
HIHWFSTTFEEMATK

SEQ ID NO: 282200 - protein, 15 aa, Artificial Sequence
  Description of Artificial Sequence: Synthetic peptide
  Seed: HIHIFSFTGEEMATK
HIHWFSTTFEENATK

SEQ ID NO: 282201 - protein, 15 aa, Artificial Sequence
  Description of Artificial Sequence: Synthetic peptide
  Seed: HIHIFSFTGEEMATK
HIHWFSTTFEEQATK

SEQ ID NO: 282202 - protein, 15 aa, Artificial Sequence
  Description of Artificial Sequence: Synthetic peptide
  Seed: HIHIFSFTGEEMATK
HIHWFSTTFEESATK

SEQ ID NO: 282203 - protein, 15 aa, Artificial Sequence
  Description of Artificial Sequence: Synthetic peptide
  Seed: HIHIFSFTGEEMATK
HIHWFSTTFEETATK

SEQ ID NO: 282204 - protein, 15 aa, Artificial Sequence
  Description of Artificial Sequence: Synthetic peptide
  Seed: HIHIFSFTGEEMATK
HIHWFSTTFEEVATK

SEQ ID NO: 282205 - protein, 15 aa, Artificial Sequence
  Description of Artificial Sequence: Synthetic peptide
  Seed: HIHIFSFTGEEMATK
HIHWFSTTFEEWATK

SEQ ID NO: 282206 - protein, 15 aa, Artificial Sequence
  Description of Artificial Sequence: Synthetic peptide
  Seed: HIHIFSFTGEEMATK
HIHWFSTTFEEYATK

SEQ ID NO: 282207 - protein, 15 aa, Artificial Sequence
  Description of Artificial Sequence: Synthetic peptide
  Seed: HIHIFSFTGEEMATK
HIHWFSTTIEEFATK

SEQ ID NO: 282208 - protein, 15 aa, Artificial Sequence
  Description of Artificial Sequence: Synthetic peptide
  Seed: HIHIFSFTGEEMATK
HIHWFSTTIEEIATK

SEQ ID NO: 282209 - protein, 15 aa, Artificial Sequence
  Description of Artificial Sequence: Synthetic peptide
  Seed: HIHIFSFTGEEMATK
HIHWFSTTIEELATK

SEQ ID NO: 282210 - protein, 15 aa, Artificial Sequence
  Description of Artificial Sequence: Synthetic peptide
  Seed: HIHIFSFTGEEMATK
HIHWFSTTIEEVATK

SEQ ID NO: 282211 - protein, 15 aa, Artificial Sequence
  Description of Artificial Sequence: Synthetic peptide
  Seed: HIHIFSFTGEEMATK
HIHWFSTTLEEFATK

SEQ ID NO: 282212 - protein, 15 aa, Artificial Sequence
  Description of Artificial Sequence: Synthetic peptide
  Seed: HIHIFSFTGEEMATK
HIHWFSTTLEEIATK

SEQ ID NO: 282213 - protein, 15 aa, Artificial Sequence
  Description of Artificial Sequence: Synthetic peptide
  Seed: HIHIFSFTGEEMATK
HIHWFSTTLEELATK

SEQ ID NO: 282214 - protein, 15 aa, Artificial Sequence
  Description of Artificial Sequence: Synthetic peptide
  Seed: HIHIFSFTGEEMATK
HIHWFSTTLEEMATK

SEQ ID NO: 282215 - protein, 15 aa, Artificial Sequence
  Description of Artificial Sequence: Synthetic peptide
  Seed: HIHIFSFTGEEMATK
HIHWFSTTLEEVATK

SEQ ID NO: 282216 - protein, 15 aa, Artificial Sequence
  Description of Artificial Sequence: Synthetic peptide
  Seed: HIHIFSFTGEEMATK
HIHWFSTTMEEFATK

SEQ ID NO: 282217 - protein, 15 aa, Artificial Sequence
  Description of Artificial Sequence: Synthetic peptide
  Seed: HIHIFSFTGEEMATK
HIHWFSTTMEEIATK

SEQ ID NO: 282218 - protein, 15 aa, Artificial Sequence
  Description of Artificial Sequence: Synthetic peptide
  Seed: HIHIFSFTGEEMATK
HIHWFSTTMEELATK

SEQ ID NO: 282219 - protein, 15 aa, Artificial Sequence
  Description of Artificial Sequence: Synthetic peptide
  Seed: HIHIFSFTGEEMATK
HIHWFSTTMEEVATK

SEQ ID NO: 282220 - protein, 15 aa, Artificial Sequence
  Description of Artificial Sequence: Synthetic peptide
  Seed: HIHIFSFTGEEMATK
HIHWFSTTWEEFATK

SEQ ID NO: 282221 - protein, 15 aa, Artificial Sequence
  Description of Artificial Sequence: Synthetic peptide
  Seed: HIHIFSFTGEEMATK
HIHWFSTTWEEIATK

SEQ ID NO: 282222 - protein, 15 aa, Artificial Sequence
  Description of Artificial Sequence: Synthetic peptide
  Seed: HIHIFSFTGEEMATK
HIHWFSTTWEELATK

SEQ ID NO: 282223 - protein, 15 aa, Artificial Sequence
  Description of Artificial Sequence: Synthetic peptide
  Seed: HIHIFSFTGEEMATK
HIHWFSTTWEEMATK

SEQ ID NO: 282224 - protein, 15 aa, Artificial Sequence
  Description of Artificial Sequence: Synthetic peptide
  Seed: HIHIFSFTGEEMATK
HIHWFSTTWEEVATK

SEQ ID NO: 282225 - protein, 15 aa, Artificial Sequence
  Description of Artificial Sequence: Synthetic peptide
  Seed: HIHIFSFTGEEMATK
HIHWFSTTYEEFATK

SEQ ID NO: 282226 - protein, 15 aa, Artificial Sequence
  Description of Artificial Sequence: Synthetic peptide
  Seed: HIHIFSFTGEEMATK
HIHWFSTTYEEIATK

SEQ ID NO: 282227 - protein, 15 aa, Artificial Sequence
  Description of Artificial Sequence: Synthetic peptide
  Seed: HIHIFSFTGEEMATK
HIHWFSTTYEELATK

SEQ ID NO: 282228 - protein, 15 aa, Artificial Sequence
  Description of Artificial Sequence: Synthetic peptide
  Seed: HIHIFSFTGEEMATK
HIHWFSTTYEEMATK

SEQ ID NO: 282229 - protein, 15 aa, Artificial Sequence
  Description of Artificial Sequence: Synthetic peptide
  Seed: HIHIFSFTGEEMATK
HIHWFSTTYEEVATK

SEQ ID NO: 282230 - protein, 15 aa, Artificial Sequence
  Description of Artificial Sequence: Synthetic peptide
  Seed: HIHIFSFTGEEMATK
HIHWFSVTAEEAATK

SEQ ID NO: 282231 - protein, 15 aa, Artificial Sequence
  Description of Artificial Sequence: Synthetic peptide
  Seed: HIHIFSFTGEEMATK
HIHWFSVTAEEIATK

SEQ ID NO: 282232 - protein, 15 aa, Artificial Sequence
  Description of Artificial Sequence: Synthetic peptide
  Seed: HIHIFSFTGEEMATK
HIHWFSVTAEELATK

SEQ ID NO: 282233 - protein, 15 aa, Artificial Sequence
  Description of Artificial Sequence: Synthetic peptide
  Seed: HIHIFSFTGEEMATK
HIHWFSVTAEESATK

SEQ ID NO: 282234 - protein, 15 aa, Artificial Sequence
  Description of Artificial Sequence: Synthetic peptide
  Seed: HIHIFSFTGEEMATK
HIHWFSVTAEEVATK

SEQ ID NO: 282235 - protein, 15 aa, Artificial Sequence
  Description of Artificial Sequence: Synthetic peptide
  Seed: HIHIFSFTGEEMATK
HIHWFSVTFEEAATK

SEQ ID NO: 282236 - protein, 15 aa, Artificial Sequence
  Description of Artificial Sequence: Synthetic peptide
  Seed: HIHIFSFTGEEMATK
HIHWFSVTFEEDATK

SEQ ID NO: 282237 - protein, 15 aa, Artificial Sequence
  Description of Artificial Sequence: Synthetic peptide
  Seed: HIHIFSFTGEEMATK
HIHWFSVTFEEEATK

SEQ ID NO: 282238 - protein, 15 aa, Artificial Sequence
  Description of Artificial Sequence: Synthetic peptide
  Seed: HIHIFSFTGEEMATK
HIHWFSVTFEEFATK

SEQ ID NO: 282239 - protein, 15 aa, Artificial Sequence
  Description of Artificial Sequence: Synthetic peptide
  Seed: HIHIFSFTGEEMATK
HIHWFSVTFEEHATK

SEQ ID NO: 282240 - protein, 15 aa, Artificial Sequence
  Description of Artificial Sequence: Synthetic peptide
  Seed: HIHIFSFTGEEMATK
HIHWFSVTFEEIATK

SEQ ID NO: 282241 - protein, 15 aa, Artificial Sequence
  Description of Artificial Sequence: Synthetic peptide
  Seed: HIHIFSFTGEEMATK
HIHWFSVTFEELATK

SEQ ID NO: 282242 - protein, 15 aa, Artificial Sequence
  Description of Artificial Sequence: Synthetic peptide
  Seed: HIHIFSFTGEEMATK
HIHWFSVTFEEMATK

SEQ ID NO: 282243 - protein, 15 aa, Artificial Sequence
  Description of Artificial Sequence: Synthetic peptide
  Seed: HIHIFSFTGEEMATK
HIHWFSVTFEENATK

SEQ ID NO: 282244 - protein, 15 aa, Artificial Sequence
  Description of Artificial Sequence: Synthetic peptide
  Seed: HIHIFSFTGEEMATK
HIHWFSVTFEEPATK

SEQ ID NO: 282245 - protein, 15 aa, Artificial Sequence
  Description of Artificial Sequence: Synthetic peptide
  Seed: HIHIFSFTGEEMATK
HIHWFSVTFEEQATK

SEQ ID NO: 282246 - protein, 15 aa, Artificial Sequence
  Description of Artificial Sequence: Synthetic peptide
  Seed: HIHIFSFTGEEMATK
HIHWFSVTFEERATK

SEQ ID NO: 282247 - protein, 15 aa, Artificial Sequence
  Description of Artificial Sequence: Synthetic peptide
  Seed: HIHIFSFTGEEMATK
HIHWFSVTFEESATK

SEQ ID NO: 282248 - protein, 15 aa, Artificial Sequence
  Description of Artificial Sequence: Synthetic peptide
  Seed: HIHIFSFTGEEMATK
HIHWFSVTFEETATK

SEQ ID NO: 282249 - protein, 15 aa, Artificial Sequence
  Description of Artificial Sequence: Synthetic peptide
  Seed: HIHIFSFTGEEMATK
HIHWFSVTFEEVATK

SEQ ID NO: 282250 - protein, 15 aa, Artificial Sequence
  Description of Artificial Sequence: Synthetic peptide
  Seed: HIHIFSFTGEEMATK
HIHWFSVTFEEYATK

SEQ ID NO: 282251 - protein, 15 aa, Artificial Sequence
  Description of Artificial Sequence: Synthetic peptide
  Seed: HIHIFSFTGEEMATK
HIHWFSVTGEEAATK

SEQ ID NO: 282252 - protein, 15 aa, Artificial Sequence
  Description of Artificial Sequence: Synthetic peptide
  Seed: HIHIFSFTGEEMATK
HIHWFSVTGEEIATK

SEQ ID NO: 282253 - protein, 15 aa, Artificial Sequence
  Description of Artificial Sequence: Synthetic peptide
  Seed: HIHIFSFTGEEMATK
HIHWFSVTGEELATK

SEQ ID NO: 282254 - protein, 15 aa, Artificial Sequence
  Description of Artificial Sequence: Synthetic peptide
  Seed: HIHIFSFTGEEMATK
HIHWFSVTGEEVATK

SEQ ID NO: 282255 - protein, 15 aa, Artificial Sequence
  Description of Artificial Sequence: Synthetic peptide
  Seed: HIHIFSFTGEEMATK
HIHWFSVTIEEAATK

SEQ ID NO: 282256 - protein, 15 aa, Artificial Sequence
  Description of Artificial Sequence: Synthetic peptide
  Seed: HIHIFSFTGEEMATK
HIHWFSVTIEEFATK

SEQ ID NO: 282257 - protein, 15 aa, Artificial Sequence
  Description of Artificial Sequence: Synthetic peptide
  Seed: HIHIFSFTGEEMATK
HIHWFSVTIEEIATK

SEQ ID NO: 282258 - protein, 15 aa, Artificial Sequence
  Description of Artificial Sequence: Synthetic peptide
  Seed: HIHIFSFTGEEMATK
HIHWFSVTIEELATK

SEQ ID NO: 282259 - protein, 15 aa, Artificial Sequence
  Description of Artificial Sequence: Synthetic peptide
  Seed: HIHIFSFTGEEMATK
HIHWFSVTLEEFATK

SEQ ID NO: 282260 - protein, 15 aa, Artificial Sequence
  Description of Artificial Sequence: Synthetic peptide
  Seed: HIHIFSFTGEEMATK
HIHWFSVTLEEIATK

SEQ ID NO: 282261 - protein, 15 aa, Artificial Sequence
  Description of Artificial Sequence: Synthetic peptide
  Seed: HIHIFSFTGEEMATK
HIHWFSVTLEELATK

SEQ ID NO: 282262 - protein, 15 aa, Artificial Sequence
  Description of Artificial Sequence: Synthetic peptide
  Seed: HIHIFSFTGEEMATK
HIHWFSVTLEEMATK

SEQ ID NO: 282263 - protein, 15 aa, Artificial Sequence
  Description of Artificial Sequence: Synthetic peptide
  Seed: HIHIFSFTGEEMATK
HIHWFSVTLEEVATK

SEQ ID NO: 282264 - protein, 15 aa, Artificial Sequence
  Description of Artificial Sequence: Synthetic peptide
  Seed: HIHIFSFTGEEMATK
HIHWFSVTMEEFATK

SEQ ID NO: 282265 - protein, 15 aa, Artificial Sequence
  Description of Artificial Sequence: Synthetic peptide
  Seed: HIHIFSFTGEEMATK
HIHWFSVTMEEIATK

SEQ ID NO: 282266 - protein, 15 aa, Artificial Sequence
  Description of Artificial Sequence: Synthetic peptide
  Seed: HIHIFSFTGEEMATK
HIHWFSVTMEELATK

SEQ ID NO: 282267 - protein, 15 aa, Artificial Sequence
  Description of Artificial Sequence: Synthetic peptide
  Seed: HIHIFSFTGEEMATK
HIHWFSVTPEEAATK

SEQ ID NO: 282268 - protein, 15 aa, Artificial Sequence
  Description of Artificial Sequence: Synthetic peptide
  Seed: HIHIFSFTGEEMATK
HIHWFSVTSEEAATK

SEQ ID NO: 282269 - protein, 15 aa, Artificial Sequence
  Description of Artificial Sequence: Synthetic peptide
  Seed: HIHIFSFTGEEMATK
HIHWFSVTSEELATK

SEQ ID NO: 282270 - protein, 15 aa, Artificial Sequence
  Description of Artificial Sequence: Synthetic peptide
  Seed: HIHIFSFTGEEMATK
HIHWFSVTSEEVATK

SEQ ID NO: 282271 - protein, 15 aa, Artificial Sequence
  Description of Artificial Sequence: Synthetic peptide
  Seed: HIHIFSFTGEEMATK
HIHWFSVTTEEAATK

SEQ ID NO: 282272 - protein, 15 aa, Artificial Sequence
  Description of Artificial Sequence: Synthetic peptide
  Seed: HIHIFSFTGEEMATK
HIHWFSVTVEEAATK

SEQ ID NO: 282273 - protein, 15 aa, Artificial Sequence
  Description of Artificial Sequence: Synthetic peptide
  Seed: HIHIFSFTGEEMATK
HIHWFSVTVEESATK

SEQ ID NO: 282274 - protein, 15 aa, Artificial Sequence
  Description of Artificial Sequence: Synthetic peptide
  Seed: HIHIFSFTGEEMATK
HIHWFSVTWEEFATK

SEQ ID NO: 282275 - protein, 15 aa, Artificial Sequence
  Description of Artificial Sequence: Synthetic peptide
  Seed: HIHIFSFTGEEMATK
HIHWFSVTWEEIATK

SEQ ID NO: 282276 - protein, 15 aa, Artificial Sequence
  Description of Artificial Sequence: Synthetic peptide
  Seed: HIHIFSFTGEEMATK
HIHWFSVTWEELATK

SEQ ID NO: 282277 - protein, 15 aa, Artificial Sequence
  Description of Artificial Sequence: Synthetic peptide
  Seed: HIHIFSFTGEEMATK
HIHWFSVTWEEMATK

SEQ ID NO: 282278 - protein, 15 aa, Artificial Sequence
  Description of Artificial Sequence: Synthetic peptide
  Seed: HIHIFSFTGEEMATK
HIHWFSVTWEEVATK

SEQ ID NO: 282279 - protein, 15 aa, Artificial Sequence
  Description of Artificial Sequence: Synthetic peptide
  Seed: HIHIFSFTGEEMATK
HIHWFSVTYEEFATK

SEQ ID NO: 282280 - protein, 15 aa, Artificial Sequence
  Description of Artificial Sequence: Synthetic peptide
  Seed: HIHIFSFTGEEMATK
HIHWFSVTYEEIATK

SEQ ID NO: 282281 - protein, 15 aa, Artificial Sequence
  Description of Artificial Sequence: Synthetic peptide
  Seed: HIHIFSFTGEEMATK
HIHWFSVTYEELATK

SEQ ID NO: 282282 - protein, 15 aa, Artificial Sequence
  Description of Artificial Sequence: Synthetic peptide
  Seed: HIHIFSFTGEEMATK
HIHWFSVTYEEMATK

SEQ ID NO: 282283 - protein, 15 aa, Artificial Sequence
  Description of Artificial Sequence: Synthetic peptide
  Seed: HIHIFSFTGEEMATK
HIHWFSVTYEEVATK

SEQ ID NO: 282284 - protein, 15 aa, Artificial Sequence
  Description of Artificial Sequence: Synthetic peptide
  Seed: HIHIFSFTGEEMATK
HIHWFSWTFEEFATK

SEQ ID NO: 282285 - protein, 15 aa, Artificial Sequence
  Description of Artificial Sequence: Synthetic peptide
  Seed: HIHIFSFTGEEMATK
HIHWFSWTFEEIATK

SEQ ID NO: 282286 - protein, 15 aa, Artificial Sequence
  Description of Artificial Sequence: Synthetic peptide
  Seed: HIHIFSFTGEEMATK
HIHWFSWTFEELATK

SEQ ID NO: 282287 - protein, 15 aa, Artificial Sequence
  Description of Artificial Sequence: Synthetic peptide
  Seed: HIHIFSFTGEEMATK
HIHWFSWTFEEMATK

SEQ ID NO: 282288 - protein, 15 aa, Artificial Sequence
  Description of Artificial Sequence: Synthetic peptide
  Seed: HIHIFSFTGEEMATK
HIHWFSWTFEEVATK

SEQ ID NO: 282289 - protein, 15 aa, Artificial Sequence
  Description of Artificial Sequence: Synthetic peptide
  Seed: HIHIFSFTGEEMATK
HIHWFSWTIEELATK

SEQ ID NO: 282290 - protein, 15 aa, Artificial Sequence
  Description of Artificial Sequence: Synthetic peptide
  Seed: HIHIFSFTGEEMATK
HIHWFSWTLEEFATK

SEQ ID NO: 282291 - protein, 15 aa, Artificial Sequence
  Description of Artificial Sequence: Synthetic peptide
  Seed: HIHIFSFTGEEMATK
HIHWFSWTLEEIATK

SEQ ID NO: 282292 - protein, 15 aa, Artificial Sequence
  Description of Artificial Sequence: Synthetic peptide
  Seed: HIHIFSFTGEEMATK
HIHWFSWTLEELATK

SEQ ID NO: 282293 - protein, 15 aa, Artificial Sequence
  Description of Artificial Sequence: Synthetic peptide
  Seed: HIHIFSFTGEEMATK
HIHWFSWTLEEVATK

SEQ ID NO: 282294 - protein, 15 aa, Artificial Sequence
  Description of Artificial Sequence: Synthetic peptide
  Seed: HIHIFSFTGEEMATK
HIHWFSWTMEELATK

SEQ ID NO: 282295 - protein, 15 aa, Artificial Sequence
  Description of Artificial Sequence: Synthetic peptide
  Seed: HIHIFSFTGEEMATK
HIHWFSWTYEEFATK

SEQ ID NO: 282296 - protein, 15 aa, Artificial Sequence
  Description of Artificial Sequence: Synthetic peptide
  Seed: HIHIFSFTGEEMATK
HIHWFSWTYEEIATK

SEQ ID NO: 282297 - protein, 15 aa, Artificial Sequence
  Description of Artificial Sequence: Synthetic peptide
  Seed: HIHIFSFTGEEMATK
HIHWFSWTYEELATK

SEQ ID NO: 282298 - protein, 15 aa, Artificial Sequence
  Description of Artificial Sequence: Synthetic peptide
  Seed: HIHIFSFTGEEMATK
HIHWFSYTFEEAATK

SEQ ID NO: 282299 - protein, 15 aa, Artificial Sequence
  Description of Artificial Sequence: Synthetic peptide
  Seed: HIHIFSFTGEEMATK
HIHWFSYTFEEFATK

SEQ ID NO: 282300 - protein, 15 aa, Artificial Sequence
  Description of Artificial Sequence: Synthetic peptide
  Seed: HIHIFSFTGEEMATK
HIHWFSYTFEEIATK

SEQ ID NO: 282301 - protein, 15 aa, Artificial Sequence
  Description of Artificial Sequence: Synthetic peptide
  Seed: HIHIFSFTGEEMATK
HIHWFSYTFEELATK

SEQ ID NO: 282302 - protein, 15 aa, Artificial Sequence
  Description of Artificial Sequence: Synthetic peptide
  Seed: HIHIFSFTGEEMATK
HIHWFSYTFEEMATK

SEQ ID NO: 282303 - protein, 15 aa, Artificial Sequence
  Description of Artificial Sequence: Synthetic peptide
  Seed: HIHIFSFTGEEMATK
HIHWFSYTFEETATK

SEQ ID NO: 282304 - protein, 15 aa, Artificial Sequence
  Description of Artificial Sequence: Synthetic peptide
  Seed: HIHIFSFTGEEMATK
HIHWFSYTFEEVATK

SEQ ID NO: 282305 - protein, 15 aa, Artificial Sequence
  Description of Artificial Sequence: Synthetic peptide
  Seed: HIHIFSFTGEEMATK
HIHWFSYTFEEYATK

SEQ ID NO: 282306 - protein, 15 aa, Artificial Sequence
  Description of Artificial Sequence: Synthetic peptide
  Seed: HIHIFSFTGEEMATK
HIHWFSYTIEELATK

SEQ ID NO: 282307 - protein, 15 aa, Artificial Sequence
  Description of Artificial Sequence: Synthetic peptide
  Seed: HIHIFSFTGEEMATK
HIHWFSYTLEEFATK

SEQ ID NO: 282308 - protein, 15 aa, Artificial Sequence
  Description of Artificial Sequence: Synthetic peptide
  Seed: HIHIFSFTGEEMATK
HIHWFSYTLEEIATK

SEQ ID NO: 282309 - protein, 15 aa, Artificial Sequence
  Description of Artificial Sequence: Synthetic peptide
  Seed: HIHIFSFTGEEMATK
HIHWFSYTLEELATK

SEQ ID NO: 282310 - protein, 15 aa, Artificial Sequence
  Description of Artificial Sequence: Synthetic peptide
  Seed: HIHIFSFTGEEMATK
HIHWFSYTLEEMATK

SEQ ID NO: 282311 - protein, 15 aa, Artificial Sequence
  Description of Artificial Sequence: Synthetic peptide
  Seed: HIHIFSFTGEEMATK
HIHWFSYTLEEVATK

SEQ ID NO: 282312 - protein, 15 aa, Artificial Sequence
  Description of Artificial Sequence: Synthetic peptide
  Seed: HIHIFSFTGEEMATK
HIHWFSYTMEELATK

SEQ ID NO: 282313 - protein, 15 aa, Artificial Sequence
  Description of Artificial Sequence: Synthetic peptide
  Seed: HIHIFSFTGEEMATK
HIHWFSYTWEELATK

SEQ ID NO: 282314 - protein, 15 aa, Artificial Sequence
  Description of Artificial Sequence: Synthetic peptide
  Seed: HIHIFSFTGEEMATK
HIHWFSYTYEEFATK

SEQ ID NO: 282315 - protein, 15 aa, Artificial Sequence
  Description of Artificial Sequence: Synthetic peptide
  Seed: HIHIFSFTGEEMATK
HIHWFSYTYEEIATK

SEQ ID NO: 282316 - protein, 15 aa, Artificial Sequence
  Description of Artificial Sequence: Synthetic peptide
  Seed: HIHIFSFTGEEMATK
HIHWFSYTYEELATK

SEQ ID NO: 282317 - protein, 15 aa, Artificial Sequence
  Description of Artificial Sequence: Synthetic peptide
  Seed: HIHIFSFTGEEMATK
HIHYFSATAEEAATK

SEQ ID NO: 282318 - protein, 15 aa, Artificial Sequence
  Description of Artificial Sequence: Synthetic peptide
  Seed: HIHIFSFTGEEMATK
HIHYFSATAEEGATK

SEQ ID NO: 282319 - protein, 15 aa, Artificial Sequence
  Description of Artificial Sequence: Synthetic peptide
  Seed: HIHIFSFTGEEMATK
HIHYFSATAEEHATK

SEQ ID NO: 282320 - protein, 15 aa, Artificial Sequence
  Description of Artificial Sequence: Synthetic peptide
  Seed: HIHIFSFTGEEMATK
HIHYFSATAEEIATK

SEQ ID NO: 282321 - protein, 15 aa, Artificial Sequence
  Description of Artificial Sequence: Synthetic peptide
  Seed: HIHIFSFTGEEMATK
HIHYFSATAEELATK

SEQ ID NO: 282322 - protein, 15 aa, Artificial Sequence
  Description of Artificial Sequence: Synthetic peptide
  Seed: HIHIFSFTGEEMATK
HIHYFSATAEEMATK

SEQ ID NO: 282323 - protein, 15 aa, Artificial Sequence
  Description of Artificial Sequence: Synthetic peptide
  Seed: HIHIFSFTGEEMATK
HIHYFSATAEENATK

SEQ ID NO: 282324 - protein, 15 aa, Artificial Sequence
  Description of Artificial Sequence: Synthetic peptide
  Seed: HIHIFSFTGEEMATK
HIHYFSATAEEQATK

SEQ ID NO: 282325 - protein, 15 aa, Artificial Sequence
  Description of Artificial Sequence: Synthetic peptide
  Seed: HIHIFSFTGEEMATK
HIHYFSATAEESATK

SEQ ID NO: 282326 - protein, 15 aa, Artificial Sequence
  Description of Artificial Sequence: Synthetic peptide
  Seed: HIHIFSFTGEEMATK
HIHYFSATAEETATK

SEQ ID NO: 282327 - protein, 15 aa, Artificial Sequence
  Description of Artificial Sequence: Synthetic peptide
  Seed: HIHIFSFTGEEMATK
HIHYFSATAEEVATK

SEQ ID NO: 282328 - protein, 15 aa, Artificial Sequence
  Description of Artificial Sequence: Synthetic peptide
  Seed: HIHIFSFTGEEMATK
HIHYFSATFEEAATK

SEQ ID NO: 282329 - protein, 15 aa, Artificial Sequence
  Description of Artificial Sequence: Synthetic peptide
  Seed: HIHIFSFTGEEMATK
HIHYFSATFEEDATK

SEQ ID NO: 282330 - protein, 15 aa, Artificial Sequence
  Description of Artificial Sequence: Synthetic peptide
  Seed: HIHIFSFTGEEMATK
HIHYFSATFEEEATK

SEQ ID NO: 282331 - protein, 15 aa, Artificial Sequence
  Description of Artificial Sequence: Synthetic peptide
  Seed: HIHIFSFTGEEMATK
HIHYFSATFEEFATK

SEQ ID NO: 282332 - protein, 15 aa, Artificial Sequence
  Description of Artificial Sequence: Synthetic peptide
  Seed: HIHIFSFTGEEMATK
HIHYFSATFEEIATK

SEQ ID NO: 282333 - protein, 15 aa, Artificial Sequence
  Description of Artificial Sequence: Synthetic peptide
  Seed: HIHIFSFTGEEMATK
HIHYFSATFEELATK

SEQ ID NO: 282334 - protein, 15 aa, Artificial Sequence
  Description of Artificial Sequence: Synthetic peptide
  Seed: HIHIFSFTGEEMATK
HIHYFSATFEEMATK

SEQ ID NO: 282335 - protein, 15 aa, Artificial Sequence
  Description of Artificial Sequence: Synthetic peptide
  Seed: HIHIFSFTGEEMATK
HIHYFSATFEENATK

SEQ ID NO: 282336 - protein, 15 aa, Artificial Sequence
  Description of Artificial Sequence: Synthetic peptide
  Seed: HIHIFSFTGEEMATK
HIHYFSATFEESATK

SEQ ID NO: 282337 - protein, 15 aa, Artificial Sequence
  Description of Artificial Sequence: Synthetic peptide
  Seed: HIHIFSFTGEEMATK
HIHYFSATFEETATK

SEQ ID NO: 282338 - protein, 15 aa, Artificial Sequence
  Description of Artificial Sequence: Synthetic peptide
  Seed: HIHIFSFTGEEMATK
HIHYFSATFEEVATK

SEQ ID NO: 282339 - protein, 15 aa, Artificial Sequence
  Description of Artificial Sequence: Synthetic peptide
  Seed: HIHIFSFTGEEMATK
HIHYFSATFEEWATK

SEQ ID NO: 282340 - protein, 15 aa, Artificial Sequence
  Description of Artificial Sequence: Synthetic peptide
  Seed: HIHIFSFTGEEMATK
HIHYFSATFEEYATK

SEQ ID NO: 282341 - protein, 15 aa, Artificial Sequence
  Description of Artificial Sequence: Synthetic peptide
  Seed: HIHIFSFTGEEMATK
HIHYFSATGEEAATK

SEQ ID NO: 282342 - protein, 15 aa, Artificial Sequence
  Description of Artificial Sequence: Synthetic peptide
  Seed: HIHIFSFTGEEMATK
HIHYFSATGEEIATK

SEQ ID NO: 282343 - protein, 15 aa, Artificial Sequence
  Description of Artificial Sequence: Synthetic peptide
  Seed: HIHIFSFTGEEMATK
HIHYFSATGEELATK

SEQ ID NO: 282344 - protein, 15 aa, Artificial Sequence
  Description of Artificial Sequence: Synthetic peptide
  Seed: HIHIFSFTGEEMATK
HIHYFSATGEEMATK

SEQ ID NO: 282345 - protein, 15 aa, Artificial Sequence
  Description of Artificial Sequence: Synthetic peptide
  Seed: HIHIFSFTGEEMATK
HIHYFSATGEESATK

SEQ ID NO: 282346 - protein, 15 aa, Artificial Sequence
  Description of Artificial Sequence: Synthetic peptide
  Seed: HIHIFSFTGEEMATK
HIHYFSATGEETATK

SEQ ID NO: 282347 - protein, 15 aa, Artificial Sequence
  Description of Artificial Sequence: Synthetic peptide
  Seed: HIHIFSFTGEEMATK
HIHYFSATGEEVATK

SEQ ID NO: 282348 - protein, 15 aa, Artificial Sequence
  Description of Artificial Sequence: Synthetic peptide
  Seed: HIHIFSFTGEEMATK
HIHYFSATIEEAATK

SEQ ID NO: 282349 - protein, 15 aa, Artificial Sequence
  Description of Artificial Sequence: Synthetic peptide
  Seed: HIHIFSFTGEEMATK
HIHYFSATIEEGATK

SEQ ID NO: 282350 - protein, 15 aa, Artificial Sequence
  Description of Artificial Sequence: Synthetic peptide
  Seed: HIHIFSFTGEEMATK
HIHYFSATIEEHATK

SEQ ID NO: 282351 - protein, 15 aa, Artificial Sequence
  Description of Artificial Sequence: Synthetic peptide
  Seed: HIHIFSFTGEEMATK
HIHYFSATIEEIATK

SEQ ID NO: 282352 - protein, 15 aa, Artificial Sequence
  Description of Artificial Sequence: Synthetic peptide
  Seed: HIHIFSFTGEEMATK
HIHYFSATIEELATK

SEQ ID NO: 282353 - protein, 15 aa, Artificial Sequence
  Description of Artificial Sequence: Synthetic peptide
  Seed: HIHIFSFTGEEMATK
HIHYFSATIEEMATK

SEQ ID NO: 282354 - protein, 15 aa, Artificial Sequence
  Description of Artificial Sequence: Synthetic peptide
  Seed: HIHIFSFTGEEMATK
HIHYFSATIEENATK

SEQ ID NO: 282355 - protein, 15 aa, Artificial Sequence
  Description of Artificial Sequence: Synthetic peptide
  Seed: HIHIFSFTGEEMATK
HIHYFSATIEEQATK

SEQ ID NO: 282356 - protein, 15 aa, Artificial Sequence
  Description of Artificial Sequence: Synthetic peptide
  Seed: HIHIFSFTGEEMATK
HIHYFSATIEESATK

SEQ ID NO: 282357 - protein, 15 aa, Artificial Sequence
  Description of Artificial Sequence: Synthetic peptide
  Seed: HIHIFSFTGEEMATK
HIHYFSATIEETATK

SEQ ID NO: 282358 - protein, 15 aa, Artificial Sequence
  Description of Artificial Sequence: Synthetic peptide
  Seed: HIHIFSFTGEEMATK
HIHYFSATIEEVATK

SEQ ID NO: 282359 - protein, 15 aa, Artificial Sequence
  Description of Artificial Sequence: Synthetic peptide
  Seed: HIHIFSFTGEEMATK
HIHYFSATLEEAATK

SEQ ID NO: 282360 - protein, 15 aa, Artificial Sequence
  Description of Artificial Sequence: Synthetic peptide
  Seed: HIHIFSFTGEEMATK
HIHYFSATLEEFATK

SEQ ID NO: 282361 - protein, 15 aa, Artificial Sequence
  Description of Artificial Sequence: Synthetic peptide
  Seed: HIHIFSFTGEEMATK
HIHYFSATLEEIATK

SEQ ID NO: 282362 - protein, 15 aa, Artificial Sequence
  Description of Artificial Sequence: Synthetic peptide
  Seed: HIHIFSFTGEEMATK
HIHYFSATLEELATK

SEQ ID NO: 282363 - protein, 15 aa, Artificial Sequence
  Description of Artificial Sequence: Synthetic peptide
  Seed: HIHIFSFTGEEMATK
HIHYFSATLEEMATK

SEQ ID NO: 282364 - protein, 15 aa, Artificial Sequence
  Description of Artificial Sequence: Synthetic peptide
  Seed: HIHIFSFTGEEMATK
HIHYFSATLEESATK

SEQ ID NO: 282365 - protein, 15 aa, Artificial Sequence
  Description of Artificial Sequence: Synthetic peptide
  Seed: HIHIFSFTGEEMATK
HIHYFSATLEEVATK

SEQ ID NO: 282366 - protein, 15 aa, Artificial Sequence
  Description of Artificial Sequence: Synthetic peptide
  Seed: HIHIFSFTGEEMATK
HIHYFSATMEEAATK

SEQ ID NO: 282367 - protein, 15 aa, Artificial Sequence
  Description of Artificial Sequence: Synthetic peptide
  Seed: HIHIFSFTGEEMATK
HIHYFSATMEEIATK

SEQ ID NO: 282368 - protein, 15 aa, Artificial Sequence
  Description of Artificial Sequence: Synthetic peptide
  Seed: HIHIFSFTGEEMATK
HIHYFSATMEELATK

SEQ ID NO: 282369 - protein, 15 aa, Artificial Sequence
  Description of Artificial Sequence: Synthetic peptide
  Seed: HIHIFSFTGEEMATK
HIHYFSATMEEMATK

SEQ ID NO: 282370 - protein, 15 aa, Artificial Sequence
  Description of Artificial Sequence: Synthetic peptide
  Seed: HIHIFSFTGEEMATK
HIHYFSATMEESATK

SEQ ID NO: 282371 - protein, 15 aa, Artificial Sequence
  Description of Artificial Sequence: Synthetic peptide
  Seed: HIHIFSFTGEEMATK
HIHYFSATNEEAATK

SEQ ID NO: 282372 - protein, 15 aa, Artificial Sequence
  Description of Artificial Sequence: Synthetic peptide
  Seed: HIHIFSFTGEEMATK
HIHYFSATNEEIATK

SEQ ID NO: 282373 - protein, 15 aa, Artificial Sequence
  Description of Artificial Sequence: Synthetic peptide
  Seed: HIHIFSFTGEEMATK
HIHYFSATNEELATK

SEQ ID NO: 282374 - protein, 15 aa, Artificial Sequence
  Description of Artificial Sequence: Synthetic peptide
  Seed: HIHIFSFTGEEMATK
HIHYFSATNEEVATK

SEQ ID NO: 282375 - protein, 15 aa, Artificial Sequence
  Description of Artificial Sequence: Synthetic peptide
  Seed: HIHIFSFTGEEMATK
HIHYFSATPEEAATK

SEQ ID NO: 282376 - protein, 15 aa, Artificial Sequence
  Description of Artificial Sequence: Synthetic peptide
  Seed: HIHIFSFTGEEMATK
HIHYFSATPEEIATK

SEQ ID NO: 282377 - protein, 15 aa, Artificial Sequence
  Description of Artificial Sequence: Synthetic peptide
  Seed: HIHIFSFTGEEMATK
HIHYFSATPEELATK

SEQ ID NO: 282378 - protein, 15 aa, Artificial Sequence
  Description of Artificial Sequence: Synthetic peptide
  Seed: HIHIFSFTGEEMATK
HIHYFSATPEEMATK

SEQ ID NO: 282379 - protein, 15 aa, Artificial Sequence
  Description of Artificial Sequence: Synthetic peptide
  Seed: HIHIFSFTGEEMATK
HIHYFSATPEENATK

SEQ ID NO: 282380 - protein, 15 aa, Artificial Sequence
  Description of Artificial Sequence: Synthetic peptide
  Seed: HIHIFSFTGEEMATK
HIHYFSATPEESATK

SEQ ID NO: 282381 - protein, 15 aa, Artificial Sequence
  Description of Artificial Sequence: Synthetic peptide
  Seed: HIHIFSFTGEEMATK
HIHYFSATPEETATK

SEQ ID NO: 282382 - protein, 15 aa, Artificial Sequence
  Description of Artificial Sequence: Synthetic peptide
  Seed: HIHIFSFTGEEMATK
HIHYFSATPEEVATK

SEQ ID NO: 282383 - protein, 15 aa, Artificial Sequence
  Description of Artificial Sequence: Synthetic peptide
  Seed: HIHIFSFTGEEMATK
HIHYFSATSEEAATK

SEQ ID NO: 282384 - protein, 15 aa, Artificial Sequence
  Description of Artificial Sequence: Synthetic peptide
  Seed: HIHIFSFTGEEMATK
HIHYFSATSEEIATK

SEQ ID NO: 282385 - protein, 15 aa, Artificial Sequence
  Description of Artificial Sequence: Synthetic peptide
  Seed: HIHIFSFTGEEMATK
HIHYFSATSEELATK

SEQ ID NO: 282386 - protein, 15 aa, Artificial Sequence
  Description of Artificial Sequence: Synthetic peptide
  Seed: HIHIFSFTGEEMATK
HIHYFSATSEEMATK

SEQ ID NO: 282387 - protein, 15 aa, Artificial Sequence
  Description of Artificial Sequence: Synthetic peptide
  Seed: HIHIFSFTGEEMATK
HIHYFSATSEENATK

SEQ ID NO: 282388 - protein, 15 aa, Artificial Sequence
  Description of Artificial Sequence: Synthetic peptide
  Seed: HIHIFSFTGEEMATK
HIHYFSATSEESATK

SEQ ID NO: 282389 - protein, 15 aa, Artificial Sequence
  Description of Artificial Sequence: Synthetic peptide
  Seed: HIHIFSFTGEEMATK
HIHYFSATSEETATK

SEQ ID NO: 282390 - protein, 15 aa, Artificial Sequence
  Description of Artificial Sequence: Synthetic peptide
  Seed: HIHIFSFTGEEMATK
HIHYFSATSEEVATK

SEQ ID NO: 282391 - protein, 15 aa, Artificial Sequence
  Description of Artificial Sequence: Synthetic peptide
  Seed: HIHIFSFTGEEMATK
HIHYFSATTEEAATK

SEQ ID NO: 282392 - protein, 15 aa, Artificial Sequence
  Description of Artificial Sequence: Synthetic peptide
  Seed: HIHIFSFTGEEMATK
HIHYFSATTEEIATK

SEQ ID NO: 282393 - protein, 15 aa, Artificial Sequence
  Description of Artificial Sequence: Synthetic peptide
  Seed: HIHIFSFTGEEMATK
HIHYFSATTEELATK

SEQ ID NO: 282394 - protein, 15 aa, Artificial Sequence
  Description of Artificial Sequence: Synthetic peptide
  Seed: HIHIFSFTGEEMATK
HIHYFSATTEEMATK

SEQ ID NO: 282395 - protein, 15 aa, Artificial Sequence
  Description of Artificial Sequence: Synthetic peptide
  Seed: HIHIFSFTGEEMATK
HIHYFSATTEENATK

SEQ ID NO: 282396 - protein, 15 aa, Artificial Sequence
  Description of Artificial Sequence: Synthetic peptide
  Seed: HIHIFSFTGEEMATK
HIHYFSATTEESATK

SEQ ID NO: 282397 - protein, 15 aa, Artificial Sequence
  Description of Artificial Sequence: Synthetic peptide
  Seed: HIHIFSFTGEEMATK
HIHYFSATTEETATK

SEQ ID NO: 282398 - protein, 15 aa, Artificial Sequence
  Description of Artificial Sequence: Synthetic peptide
  Seed: HIHIFSFTGEEMATK
HIHYFSATTEEVATK

SEQ ID NO: 282399 - protein, 15 aa, Artificial Sequence
  Description of Artificial Sequence: Synthetic peptide
  Seed: HIHIFSFTGEEMATK
HIHYFSATVEEAATK

SEQ ID NO: 282400 - protein, 15 aa, Artificial Sequence
  Description of Artificial Sequence: Synthetic peptide
  Seed: HIHIFSFTGEEMATK
HIHYFSATVEEGATK

SEQ ID NO: 282401 - protein, 15 aa, Artificial Sequence
  Description of Artificial Sequence: Synthetic peptide
  Seed: HIHIFSFTGEEMATK
HIHYFSATVEEHATK

SEQ ID NO: 282402 - protein, 15 aa, Artificial Sequence
  Description of Artificial Sequence: Synthetic peptide
  Seed: HIHIFSFTGEEMATK
HIHYFSATVEEIATK

SEQ ID NO: 282403 - protein, 15 aa, Artificial Sequence
  Description of Artificial Sequence: Synthetic peptide
  Seed: HIHIFSFTGEEMATK
HIHYFSATVEELATK

SEQ ID NO: 282404 - protein, 15 aa, Artificial Sequence
  Description of Artificial Sequence: Synthetic peptide
  Seed: HIHIFSFTGEEMATK
HIHYFSATVEEMATK

SEQ ID NO: 282405 - protein, 15 aa, Artificial Sequence
  Description of Artificial Sequence: Synthetic peptide
  Seed: HIHIFSFTGEEMATK
HIHYFSATVEENATK

SEQ ID NO: 282406 - protein, 15 aa, Artificial Sequence
  Description of Artificial Sequence: Synthetic peptide
  Seed: HIHIFSFTGEEMATK
HIHYFSATVEEQATK

SEQ ID NO: 282407 - protein, 15 aa, Artificial Sequence
  Description of Artificial Sequence: Synthetic peptide
  Seed: HIHIFSFTGEEMATK
HIHYFSATVEESATK

SEQ ID NO: 282408 - protein, 15 aa, Artificial Sequence
  Description of Artificial Sequence: Synthetic peptide
  Seed: HIHIFSFTGEEMATK
HIHYFSATVEETATK

SEQ ID NO: 282409 - protein, 15 aa, Artificial Sequence
  Description of Artificial Sequence: Synthetic peptide
  Seed: HIHIFSFTGEEMATK
HIHYFSATVEEVATK

SEQ ID NO: 282410 - protein, 15 aa, Artificial Sequence
  Description of Artificial Sequence: Synthetic peptide
  Seed: HIHIFSFTGEEMATK
HIHYFSATWEEFATK

SEQ ID NO: 282411 - protein, 15 aa, Artificial Sequence
  Description of Artificial Sequence: Synthetic peptide
  Seed: HIHIFSFTGEEMATK
HIHYFSATWEEIATK

SEQ ID NO: 282412 - protein, 15 aa, Artificial Sequence
  Description of Artificial Sequence: Synthetic peptide
  Seed: HIHIFSFTGEEMATK
HIHYFSATWEELATK

SEQ ID NO: 282413 - protein, 15 aa, Artificial Sequence
  Description of Artificial Sequence: Synthetic peptide
  Seed: HIHIFSFTGEEMATK
HIHYFSATWEEVATK

SEQ ID NO: 282414 - protein, 15 aa, Artificial Sequence
  Description of Artificial Sequence: Synthetic peptide
  Seed: HIHIFSFTGEEMATK
HIHYFSATYEEFATK

SEQ ID NO: 282415 - protein, 15 aa, Artificial Sequence
  Description of Artificial Sequence: Synthetic peptide
  Seed: HIHIFSFTGEEMATK
HIHYFSATYEEIATK

SEQ ID NO: 282416 - protein, 15 aa, Artificial Sequence
  Description of Artificial Sequence: Synthetic peptide
  Seed: HIHIFSFTGEEMATK
HIHYFSATYEELATK

SEQ ID NO: 282417 - protein, 15 aa, Artificial Sequence
  Description of Artificial Sequence: Synthetic peptide
  Seed: HIHIFSFTGEEMATK
HIHYFSATYEEMATK

SEQ ID NO: 282418 - protein, 15 aa, Artificial Sequence
  Description of Artificial Sequence: Synthetic peptide
  Seed: HIHIFSFTGEEMATK
HIHYFSATYEEVATK

SEQ ID NO: 282419 - protein, 15 aa, Artificial Sequence
  Description of Artificial Sequence: Synthetic peptide
  Seed: HIHIFSFTGEEMATK
HIHYFSCTFEEFATK

SEQ ID NO: 282420 - protein, 15 aa, Artificial Sequence
  Description of Artificial Sequence: Synthetic peptide
  Seed: HIHIFSFTGEEMATK
HIHYFSCTFEEIATK

SEQ ID NO: 282421 - protein, 15 aa, Artificial Sequence
  Description of Artificial Sequence: Synthetic peptide
  Seed: HIHIFSFTGEEMATK
HIHYFSCTFEELATK

SEQ ID NO: 282422 - protein, 15 aa, Artificial Sequence
  Description of Artificial Sequence: Synthetic peptide
  Seed: HIHIFSFTGEEMATK
HIHYFSCTFEEVATK

SEQ ID NO: 282423 - protein, 15 aa, Artificial Sequence
  Description of Artificial Sequence: Synthetic peptide
  Seed: HIHIFSFTGEEMATK
HIHYFSDTFEEFATK

SEQ ID NO: 282424 - protein, 15 aa, Artificial Sequence
  Description of Artificial Sequence: Synthetic peptide
  Seed: HIHIFSFTGEEMATK
HIHYFSDTFEEIATK

SEQ ID NO: 282425 - protein, 15 aa, Artificial Sequence
  Description of Artificial Sequence: Synthetic peptide
  Seed: HIHIFSFTGEEMATK
HIHYFSDTFEELATK

SEQ ID NO: 282426 - protein, 15 aa, Artificial Sequence
  Description of Artificial Sequence: Synthetic peptide
  Seed: HIHIFSFTGEEMATK
HIHYFSDTFEEMATK

SEQ ID NO: 282427 - protein, 15 aa, Artificial Sequence
  Description of Artificial Sequence: Synthetic peptide
  Seed: HIHIFSFTGEEMATK
HIHYFSDTFEEVATK

SEQ ID NO: 282428 - protein, 15 aa, Artificial Sequence
  Description of Artificial Sequence: Synthetic peptide
  Seed: HIHIFSFTGEEMATK
HIHYFSETFEEAATK

SEQ ID NO: 282429 - protein, 15 aa, Artificial Sequence
  Description of Artificial Sequence: Synthetic peptide
  Seed: HIHIFSFTGEEMATK
HIHYFSETFEEFATK

SEQ ID NO: 282430 - protein, 15 aa, Artificial Sequence
  Description of Artificial Sequence: Synthetic peptide
  Seed: HIHIFSFTGEEMATK
HIHYFSETFEEIATK

SEQ ID NO: 282431 - protein, 15 aa, Artificial Sequence
  Description of Artificial Sequence: Synthetic peptide
  Seed: HIHIFSFTGEEMATK
HIHYFSETFEELATK

SEQ ID NO: 282432 - protein, 15 aa, Artificial Sequence
  Description of Artificial Sequence: Synthetic peptide
  Seed: HIHIFSFTGEEMATK
HIHYFSETFEEMATK

SEQ ID NO: 282433 - protein, 15 aa, Artificial Sequence
  Description of Artificial Sequence: Synthetic peptide
  Seed: HIHIFSFTGEEMATK
HIHYFSETFEETATK

SEQ ID NO: 282434 - protein, 15 aa, Artificial Sequence
  Description of Artificial Sequence: Synthetic peptide
  Seed: HIHIFSFTGEEMATK
HIHYFSETFEEVATK

SEQ ID NO: 282435 - protein, 15 aa, Artificial Sequence
  Description of Artificial Sequence: Synthetic peptide
  Seed: HIHIFSFTGEEMATK
HIHYFSETFEEWATK

SEQ ID NO: 282436 - protein, 15 aa, Artificial Sequence
  Description of Artificial Sequence: Synthetic peptide
  Seed: HIHIFSFTGEEMATK
HIHYFSETFEEYATK

SEQ ID NO: 282437 - protein, 15 aa, Artificial Sequence
  Description of Artificial Sequence: Synthetic peptide
  Seed: HIHIFSFTGEEMATK
HIHYFSETIEELATK

SEQ ID NO: 282438 - protein, 15 aa, Artificial Sequence
  Description of Artificial Sequence: Synthetic peptide
  Seed: HIHIFSFTGEEMATK
HIHYFSETLEEIATK

SEQ ID NO: 282439 - protein, 15 aa, Artificial Sequence
  Description of Artificial Sequence: Synthetic peptide
  Seed: HIHIFSFTGEEMATK
HIHYFSETLEELATK

SEQ ID NO: 282440 - protein, 15 aa, Artificial Sequence
  Description of Artificial Sequence: Synthetic peptide
  Seed: HIHIFSFTGEEMATK
HIHYFSETWEEIATK

SEQ ID NO: 282441 - protein, 15 aa, Artificial Sequence
  Description of Artificial Sequence: Synthetic peptide
  Seed: HIHIFSFTGEEMATK
HIHYFSETWEELATK

SEQ ID NO: 282442 - protein, 15 aa, Artificial Sequence
  Description of Artificial Sequence: Synthetic peptide
  Seed: HIHIFSFTGEEMATK
HIHYFSETYEEFATK

SEQ ID NO: 282443 - protein, 15 aa, Artificial Sequence
  Description of Artificial Sequence: Synthetic peptide
  Seed: HIHIFSFTGEEMATK
HIHYFSETYEEIATK

SEQ ID NO: 282444 - protein, 15 aa, Artificial Sequence
  Description of Artificial Sequence: Synthetic peptide
  Seed: HIHIFSFTGEEMATK
HIHYFSETYEELATK

SEQ ID NO: 282445 - protein, 15 aa, Artificial Sequence
  Description of Artificial Sequence: Synthetic peptide
  Seed: HIHIFSFTGEEMATK
HIHYFSETYEEVATK

SEQ ID NO: 282446 - protein, 15 aa, Artificial Sequence
  Description of Artificial Sequence: Synthetic peptide
  Seed: HIHIFSFTGEEMATK
HIHYFSFTAEEAATK

SEQ ID NO: 282447 - protein, 15 aa, Artificial Sequence
  Description of Artificial Sequence: Synthetic peptide
  Seed: HIHIFSFTGEEMATK
HIHYFSFTAEEFATK

SEQ ID NO: 282448 - protein, 15 aa, Artificial Sequence
  Description of Artificial Sequence: Synthetic peptide
  Seed: HIHIFSFTGEEMATK
HIHYFSFTAEEHATK

SEQ ID NO: 282449 - protein, 15 aa, Artificial Sequence
  Description of Artificial Sequence: Synthetic peptide
  Seed: HIHIFSFTGEEMATK
HIHYFSFTAEEIATK

SEQ ID NO: 282450 - protein, 15 aa, Artificial Sequence
  Description of Artificial Sequence: Synthetic peptide
  Seed: HIHIFSFTGEEMATK
HIHYFSFTAEELATK

SEQ ID NO: 282451 - protein, 15 aa, Artificial Sequence
  Description of Artificial Sequence: Synthetic peptide
  Seed: HIHIFSFTGEEMATK
HIHYFSFTAEEMATK

SEQ ID NO: 282452 - protein, 15 aa, Artificial Sequence
  Description of Artificial Sequence: Synthetic peptide
  Seed: HIHIFSFTGEEMATK
HIHYFSFTAEENATK

SEQ ID NO: 282453 - protein, 15 aa, Artificial Sequence
  Description of Artificial Sequence: Synthetic peptide
  Seed: HIHIFSFTGEEMATK
HIHYFSFTAEESATK

SEQ ID NO: 282454 - protein, 15 aa, Artificial Sequence
  Description of Artificial Sequence: Synthetic peptide
  Seed: HIHIFSFTGEEMATK
HIHYFSFTAEETATK

SEQ ID NO: 282455 - protein, 15 aa, Artificial Sequence
  Description of Artificial Sequence: Synthetic peptide
  Seed: HIHIFSFTGEEMATK
HIHYFSFTAEEVATK

SEQ ID NO: 282456 - protein, 15 aa, Artificial Sequence
  Description of Artificial Sequence: Synthetic peptide
  Seed: HIHIFSFTGEEMATK
HIHYFSFTFEEAATK

SEQ ID NO: 282457 - protein, 15 aa, Artificial Sequence
  Description of Artificial Sequence: Synthetic peptide
  Seed: HIHIFSFTGEEMATK
HIHYFSFTFEEDATK

SEQ ID NO: 282458 - protein, 15 aa, Artificial Sequence
  Description of Artificial Sequence: Synthetic peptide
  Seed: HIHIFSFTGEEMATK
HIHYFSFTFEEEATK

SEQ ID NO: 282459 - protein, 15 aa, Artificial Sequence
  Description of Artificial Sequence: Synthetic peptide
  Seed: HIHIFSFTGEEMATK
HIHYFSFTFEEFATK

SEQ ID NO: 282460 - protein, 15 aa, Artificial Sequence
  Description of Artificial Sequence: Synthetic peptide
  Seed: HIHIFSFTGEEMATK
HIHYFSFTFEEHATK

SEQ ID NO: 282461 - protein, 15 aa, Artificial Sequence
  Description of Artificial Sequence: Synthetic peptide
  Seed: HIHIFSFTGEEMATK
HIHYFSFTFEEIATK

SEQ ID NO: 282462 - protein, 15 aa, Artificial Sequence
  Description of Artificial Sequence: Synthetic peptide
  Seed: HIHIFSFTGEEMATK
HIHYFSFTFEEKATK

SEQ ID NO: 282463 - protein, 15 aa, Artificial Sequence
  Description of Artificial Sequence: Synthetic peptide
  Seed: HIHIFSFTGEEMATK
HIHYFSFTFEELATK

SEQ ID NO: 282464 - protein, 15 aa, Artificial Sequence
  Description of Artificial Sequence: Synthetic peptide
  Seed: HIHIFSFTGEEMATK
HIHYFSFTFEEMATK

SEQ ID NO: 282465 - protein, 15 aa, Artificial Sequence
  Description of Artificial Sequence: Synthetic peptide
  Seed: HIHIFSFTGEEMATK
HIHYFSFTFEENATK

SEQ ID NO: 282466 - protein, 15 aa, Artificial Sequence
  Description of Artificial Sequence: Synthetic peptide
  Seed: HIHIFSFTGEEMATK
HIHYFSFTFEEPATK

SEQ ID NO: 282467 - protein, 15 aa, Artificial Sequence
  Description of Artificial Sequence: Synthetic peptide
  Seed: HIHIFSFTGEEMATK
HIHYFSFTFEEQATK

SEQ ID NO: 282468 - protein, 15 aa, Artificial Sequence
  Description of Artificial Sequence: Synthetic peptide
  Seed: HIHIFSFTGEEMATK
HIHYFSFTFEERATK

SEQ ID NO: 282469 - protein, 15 aa, Artificial Sequence
  Description of Artificial Sequence: Synthetic peptide
  Seed: HIHIFSFTGEEMATK
HIHYFSFTFEESATK

SEQ ID NO: 282470 - protein, 15 aa, Artificial Sequence
  Description of Artificial Sequence: Synthetic peptide
  Seed: HIHIFSFTGEEMATK
HIHYFSFTFEETATK

SEQ ID NO: 282471 - protein, 15 aa, Artificial Sequence
  Description of Artificial Sequence: Synthetic peptide
  Seed: HIHIFSFTGEEMATK
HIHYFSFTFEEVATK

SEQ ID NO: 282472 - protein, 15 aa, Artificial Sequence
  Description of Artificial Sequence: Synthetic peptide
  Seed: HIHIFSFTGEEMATK
HIHYFSFTFEEWATK

SEQ ID NO: 282473 - protein, 15 aa, Artificial Sequence
  Description of Artificial Sequence: Synthetic peptide
  Seed: HIHIFSFTGEEMATK
HIHYFSFTFEEYATK

SEQ ID NO: 282474 - protein, 15 aa, Artificial Sequence
  Description of Artificial Sequence: Synthetic peptide
  Seed: HIHIFSFTGEEMATK
HIHYFSFTGEELATK

SEQ ID NO: 282475 - protein, 15 aa, Artificial Sequence
  Description of Artificial Sequence: Synthetic peptide
  Seed: HIHIFSFTGEEMATK
HIHYFSFTGEEVATK

SEQ ID NO: 282476 - protein, 15 aa, Artificial Sequence
  Description of Artificial Sequence: Synthetic peptide
  Seed: HIHIFSFTGEEMATK
HIHYFSFTIEEAATK

SEQ ID NO: 282477 - protein, 15 aa, Artificial Sequence
  Description of Artificial Sequence: Synthetic peptide
  Seed: HIHIFSFTGEEMATK
HIHYFSFTIEEFATK

SEQ ID NO: 282478 - protein, 15 aa, Artificial Sequence
  Description of Artificial Sequence: Synthetic peptide
  Seed: HIHIFSFTGEEMATK
HIHYFSFTIEEIATK

SEQ ID NO: 282479 - protein, 15 aa, Artificial Sequence
  Description of Artificial Sequence: Synthetic peptide
  Seed: HIHIFSFTGEEMATK
HIHYFSFTIEELATK

SEQ ID NO: 282480 - protein, 15 aa, Artificial Sequence
  Description of Artificial Sequence: Synthetic peptide
  Seed: HIHIFSFTGEEMATK
HIHYFSFTIEEMATK

SEQ ID NO: 282481 - protein, 15 aa, Artificial Sequence
  Description of Artificial Sequence: Synthetic peptide
  Seed: HIHIFSFTGEEMATK
HIHYFSFTIEETATK

SEQ ID NO: 282482 - protein, 15 aa, Artificial Sequence
  Description of Artificial Sequence: Synthetic peptide
  Seed: HIHIFSFTGEEMATK
HIHYFSFTIEEVATK

SEQ ID NO: 282483 - protein, 15 aa, Artificial Sequence
  Description of Artificial Sequence: Synthetic peptide
  Seed: HIHIFSFTGEEMATK
HIHYFSFTIEEYATK

SEQ ID NO: 282484 - protein, 15 aa, Artificial Sequence
  Description of Artificial Sequence: Synthetic peptide
  Seed: HIHIFSFTGEEMATK
HIHYFSFTLEEAATK

SEQ ID NO: 282485 - protein, 15 aa, Artificial Sequence
  Description of Artificial Sequence: Synthetic peptide
  Seed: HIHIFSFTGEEMATK
HIHYFSFTLEEFATK

SEQ ID NO: 282486 - protein, 15 aa, Artificial Sequence
  Description of Artificial Sequence: Synthetic peptide
  Seed: HIHIFSFTGEEMATK
HIHYFSFTLEEHATK

SEQ ID NO: 282487 - protein, 15 aa, Artificial Sequence
  Description of Artificial Sequence: Synthetic peptide
  Seed: HIHIFSFTGEEMATK
HIHYFSFTLEEIATK

SEQ ID NO: 282488 - protein, 15 aa, Artificial Sequence
  Description of Artificial Sequence: Synthetic peptide
  Seed: HIHIFSFTGEEMATK
HIHYFSFTLEELATK

SEQ ID NO: 282489 - protein, 15 aa, Artificial Sequence
  Description of Artificial Sequence: Synthetic peptide
  Seed: HIHIFSFTGEEMATK
HIHYFSFTLEEMATK

SEQ ID NO: 282490 - protein, 15 aa, Artificial Sequence
  Description of Artificial Sequence: Synthetic peptide
  Seed: HIHIFSFTGEEMATK
HIHYFSFTLEENATK

SEQ ID NO: 282491 - protein, 15 aa, Artificial Sequence
  Description of Artificial Sequence: Synthetic peptide
  Seed: HIHIFSFTGEEMATK
HIHYFSFTLEEPATK

SEQ ID NO: 282492 - protein, 15 aa, Artificial Sequence
  Description of Artificial Sequence: Synthetic peptide
  Seed: HIHIFSFTGEEMATK
HIHYFSFTLEEQATK

SEQ ID NO: 282493 - protein, 15 aa, Artificial Sequence
  Description of Artificial Sequence: Synthetic peptide
  Seed: HIHIFSFTGEEMATK
HIHYFSFTLEERATK

SEQ ID NO: 282494 - protein, 15 aa, Artificial Sequence
  Description of Artificial Sequence: Synthetic peptide
  Seed: HIHIFSFTGEEMATK
HIHYFSFTLEESATK

SEQ ID NO: 282495 - protein, 15 aa, Artificial Sequence
  Description of Artificial Sequence: Synthetic peptide
  Seed: HIHIFSFTGEEMATK
HIHYFSFTLEETATK

SEQ ID NO: 282496 - protein, 15 aa, Artificial Sequence
  Description of Artificial Sequence: Synthetic peptide
  Seed: HIHIFSFTGEEMATK
HIHYFSFTLEEVATK

SEQ ID NO: 282497 - protein, 15 aa, Artificial Sequence
  Description of Artificial Sequence: Synthetic peptide
  Seed: HIHIFSFTGEEMATK
HIHYFSFTLEEYATK

SEQ ID NO: 282498 - protein, 15 aa, Artificial Sequence
  Description of Artificial Sequence: Synthetic peptide
  Seed: HIHIFSFTGEEMATK
HIHYFSFTMEEAATK

SEQ ID NO: 282499 - protein, 15 aa, Artificial Sequence
  Description of Artificial Sequence: Synthetic peptide
  Seed: HIHIFSFTGEEMATK
HIHYFSFTMEEFATK

SEQ ID NO: 282500 - protein, 15 aa, Artificial Sequence
  Description of Artificial Sequence: Synthetic peptide
  Seed: HIHIFSFTGEEMATK
HIHYFSFTMEEIATK

SEQ ID NO: 282501 - protein, 15 aa, Artificial Sequence
  Description of Artificial Sequence: Synthetic peptide
  Seed: HIHIFSFTGEEMATK
HIHYFSFTMEELATK

SEQ ID NO: 282502 - protein, 15 aa, Artificial Sequence
  Description of Artificial Sequence: Synthetic peptide
  Seed: HIHIFSFTGEEMATK
HIHYFSFTMEEMATK

SEQ ID NO: 282503 - protein, 15 aa, Artificial Sequence
  Description of Artificial Sequence: Synthetic peptide
  Seed: HIHIFSFTGEEMATK
HIHYFSFTMEETATK

SEQ ID NO: 282504 - protein, 15 aa, Artificial Sequence
  Description of Artificial Sequence: Synthetic peptide
  Seed: HIHIFSFTGEEMATK
HIHYFSFTMEEVATK

SEQ ID NO: 282505 - protein, 15 aa, Artificial Sequence
  Description of Artificial Sequence: Synthetic peptide
  Seed: HIHIFSFTGEEMATK
HIHYFSFTMEEYATK

SEQ ID NO: 282506 - protein, 15 aa, Artificial Sequence
  Description of Artificial Sequence: Synthetic peptide
  Seed: HIHIFSFTGEEMATK
HIHYFSFTPEEAATK

SEQ ID NO: 282507 - protein, 15 aa, Artificial Sequence
  Description of Artificial Sequence: Synthetic peptide
  Seed: HIHIFSFTGEEMATK
HIHYFSFTPEELATK

SEQ ID NO: 282508 - protein, 15 aa, Artificial Sequence
  Description of Artificial Sequence: Synthetic peptide
  Seed: HIHIFSFTGEEMATK
HIHYFSFTPEEMATK

SEQ ID NO: 282509 - protein, 15 aa, Artificial Sequence
  Description of Artificial Sequence: Synthetic peptide
  Seed: HIHIFSFTGEEMATK
HIHYFSFTPEESATK

SEQ ID NO: 282510 - protein, 15 aa, Artificial Sequence
  Description of Artificial Sequence: Synthetic peptide
  Seed: HIHIFSFTGEEMATK
HIHYFSFTPEEVATK

SEQ ID NO: 282511 - protein, 15 aa, Artificial Sequence
  Description of Artificial Sequence: Synthetic peptide
  Seed: HIHIFSFTGEEMATK
HIHYFSFTSEEAATK

SEQ ID NO: 282512 - protein, 15 aa, Artificial Sequence
  Description of Artificial Sequence: Synthetic peptide
  Seed: HIHIFSFTGEEMATK
HIHYFSFTSEEFATK

SEQ ID NO: 282513 - protein, 15 aa, Artificial Sequence
  Description of Artificial Sequence: Synthetic peptide
  Seed: HIHIFSFTGEEMATK
HIHYFSFTSEEIATK

SEQ ID NO: 282514 - protein, 15 aa, Artificial Sequence
  Description of Artificial Sequence: Synthetic peptide
  Seed: HIHIFSFTGEEMATK
HIHYFSFTSEELATK

SEQ ID NO: 282515 - protein, 15 aa, Artificial Sequence
  Description of Artificial Sequence: Synthetic peptide
  Seed: HIHIFSFTGEEMATK
HIHYFSFTSEEVATK

SEQ ID NO: 282516 - protein, 15 aa, Artificial Sequence
  Description of Artificial Sequence: Synthetic peptide
  Seed: HIHIFSFTGEEMATK
HIHYFSFTTEEAATK

SEQ ID NO: 282517 - protein, 15 aa, Artificial Sequence
  Description of Artificial Sequence: Synthetic peptide
  Seed: HIHIFSFTGEEMATK
HIHYFSFTVEEAATK

SEQ ID NO: 282518 - protein, 15 aa, Artificial Sequence
  Description of Artificial Sequence: Synthetic peptide
  Seed: HIHIFSFTGEEMATK
HIHYFSFTVEEFATK

SEQ ID NO: 282519 - protein, 15 aa, Artificial Sequence
  Description of Artificial Sequence: Synthetic peptide
  Seed: HIHIFSFTGEEMATK
HIHYFSFTVEEIATK

SEQ ID NO: 282520 - protein, 15 aa, Artificial Sequence
  Description of Artificial Sequence: Synthetic peptide
  Seed: HIHIFSFTGEEMATK
HIHYFSFTVEELATK

SEQ ID NO: 282521 - protein, 15 aa, Artificial Sequence
  Description of Artificial Sequence: Synthetic peptide
  Seed: HIHIFSFTGEEMATK
HIHYFSFTVEEMATK

SEQ ID NO: 282522 - protein, 15 aa, Artificial Sequence
  Description of Artificial Sequence: Synthetic peptide
  Seed: HIHIFSFTGEEMATK
HIHYFSFTVEENATK

SEQ ID NO: 282523 - protein, 15 aa, Artificial Sequence
  Description of Artificial Sequence: Synthetic peptide
  Seed: HIHIFSFTGEEMATK
HIHYFSFTVEESATK

SEQ ID NO: 282524 - protein, 15 aa, Artificial Sequence
  Description of Artificial Sequence: Synthetic peptide
  Seed: HIHIFSFTGEEMATK
HIHYFSFTVEETATK

SEQ ID NO: 282525 - protein, 15 aa, Artificial Sequence
  Description of Artificial Sequence: Synthetic peptide
  Seed: HIHIFSFTGEEMATK
HIHYFSFTVEEVATK

SEQ ID NO: 282526 - protein, 15 aa, Artificial Sequence
  Description of Artificial Sequence: Synthetic peptide
  Seed: HIHIFSFTGEEMATK
HIHYFSFTWEEFATK

SEQ ID NO: 282527 - protein, 15 aa, Artificial Sequence
  Description of Artificial Sequence: Synthetic peptide
  Seed: HIHIFSFTGEEMATK
HIHYFSFTWEEIATK

SEQ ID NO: 282528 - protein, 15 aa, Artificial Sequence
  Description of Artificial Sequence: Synthetic peptide
  Seed: HIHIFSFTGEEMATK
HIHYFSFTWEELATK

SEQ ID NO: 282529 - protein, 15 aa, Artificial Sequence
  Description of Artificial Sequence: Synthetic peptide
  Seed: HIHIFSFTGEEMATK
HIHYFSFTWEEMATK

SEQ ID NO: 282530 - protein, 15 aa, Artificial Sequence
  Description of Artificial Sequence: Synthetic peptide
  Seed: HIHIFSFTGEEMATK
HIHYFSFTWEEVATK

SEQ ID NO: 282531 - protein, 15 aa, Artificial Sequence
  Description of Artificial Sequence: Synthetic peptide
  Seed: HIHIFSFTGEEMATK
HIHYFSFTWEEYATK

SEQ ID NO: 282532 - protein, 15 aa, Artificial Sequence
  Description of Artificial Sequence: Synthetic peptide
  Seed: HIHIFSFTGEEMATK
HIHYFSFTYEEAATK

SEQ ID NO: 282533 - protein, 15 aa, Artificial Sequence
  Description of Artificial Sequence: Synthetic peptide
  Seed: HIHIFSFTGEEMATK
HIHYFSFTYEEFATK

SEQ ID NO: 282534 - protein, 15 aa, Artificial Sequence
  Description of Artificial Sequence: Synthetic peptide
  Seed: HIHIFSFTGEEMATK
HIHYFSFTYEEIATK

SEQ ID NO: 282535 - protein, 15 aa, Artificial Sequence
  Description of Artificial Sequence: Synthetic peptide
  Seed: HIHIFSFTGEEMATK
HIHYFSFTYEELATK

SEQ ID NO: 282536 - protein, 15 aa, Artificial Sequence
  Description of Artificial Sequence: Synthetic peptide
  Seed: HIHIFSFTGEEMATK
HIHYFSFTYEEMATK

SEQ ID NO: 282537 - protein, 15 aa, Artificial Sequence
  Description of Artificial Sequence: Synthetic peptide
  Seed: HIHIFSFTGEEMATK
HIHYFSFTYEETATK

SEQ ID NO: 282538 - protein, 15 aa, Artificial Sequence
  Description of Artificial Sequence: Synthetic peptide
  Seed: HIHIFSFTGEEMATK
HIHYFSFTYEEVATK

SEQ ID NO: 282539 - protein, 15 aa, Artificial Sequence
  Description of Artificial Sequence: Synthetic peptide
  Seed: HIHIFSFTGEEMATK
HIHYFSFTYEEYATK

SEQ ID NO: 282540 - protein, 15 aa, Artificial Sequence
  Description of Artificial Sequence: Synthetic peptide
  Seed: HIHIFSFTGEEMATK
HIHYFSGTAEELATK

SEQ ID NO: 282541 - protein, 15 aa, Artificial Sequence
  Description of Artificial Sequence: Synthetic peptide
  Seed: HIHIFSFTGEEMATK
HIHYFSGTFEEFATK

SEQ ID NO: 282542 - protein, 15 aa, Artificial Sequence
  Description of Artificial Sequence: Synthetic peptide
  Seed: HIHIFSFTGEEMATK
HIHYFSGTFEEIATK

SEQ ID NO: 282543 - protein, 15 aa, Artificial Sequence
  Description of Artificial Sequence: Synthetic peptide
  Seed: HIHIFSFTGEEMATK
HIHYFSGTFEELATK

SEQ ID NO: 282544 - protein, 15 aa, Artificial Sequence
  Description of Artificial Sequence: Synthetic peptide
  Seed: HIHIFSFTGEEMATK
HIHYFSGTFEEVATK

SEQ ID NO: 282545 - protein, 15 aa, Artificial Sequence
  Description of Artificial Sequence: Synthetic peptide
  Seed: HIHIFSFTGEEMATK
HIHYFSHTFEEAATK

SEQ ID NO: 282546 - protein, 15 aa, Artificial Sequence
  Description of Artificial Sequence: Synthetic peptide
  Seed: HIHIFSFTGEEMATK
HIHYFSHTFEEEATK

SEQ ID NO: 282547 - protein, 15 aa, Artificial Sequence
  Description of Artificial Sequence: Synthetic peptide
  Seed: HIHIFSFTGEEMATK
HIHYFSHTFEEFATK

SEQ ID NO: 282548 - protein, 15 aa, Artificial Sequence
  Description of Artificial Sequence: Synthetic peptide
  Seed: HIHIFSFTGEEMATK
HIHYFSHTFEEIATK

SEQ ID NO: 282549 - protein, 15 aa, Artificial Sequence
  Description of Artificial Sequence: Synthetic peptide
  Seed: HIHIFSFTGEEMATK
HIHYFSHTFEELATK

SEQ ID NO: 282550 - protein, 15 aa, Artificial Sequence
  Description of Artificial Sequence: Synthetic peptide
  Seed: HIHIFSFTGEEMATK
HIHYFSHTFEEMATK

SEQ ID NO: 282551 - protein, 15 aa, Artificial Sequence
  Description of Artificial Sequence: Synthetic peptide
  Seed: HIHIFSFTGEEMATK
HIHYFSHTFEENATK

SEQ ID NO: 282552 - protein, 15 aa, Artificial Sequence
  Description of Artificial Sequence: Synthetic peptide
  Seed: HIHIFSFTGEEMATK
HIHYFSHTFEESATK

SEQ ID NO: 282553 - protein, 15 aa, Artificial Sequence
  Description of Artificial Sequence: Synthetic peptide
  Seed: HIHIFSFTGEEMATK
HIHYFSHTFEETATK

SEQ ID NO: 282554 - protein, 15 aa, Artificial Sequence
  Description of Artificial Sequence: Synthetic peptide
  Seed: HIHIFSFTGEEMATK
HIHYFSHTFEEVATK

SEQ ID NO: 282555 - protein, 15 aa, Artificial Sequence
  Description of Artificial Sequence: Synthetic peptide
  Seed: HIHIFSFTGEEMATK
HIHYFSHTFEEWATK

SEQ ID NO: 282556 - protein, 15 aa, Artificial Sequence
  Description of Artificial Sequence: Synthetic peptide
  Seed: HIHIFSFTGEEMATK
HIHYFSHTFEEYATK

SEQ ID NO: 282557 - protein, 15 aa, Artificial Sequence
  Description of Artificial Sequence: Synthetic peptide
  Seed: HIHIFSFTGEEMATK
HIHYFSHTIEEIATK

SEQ ID NO: 282558 - protein, 15 aa, Artificial Sequence
  Description of Artificial Sequence: Synthetic peptide
  Seed: HIHIFSFTGEEMATK
HIHYFSHTIEELATK

SEQ ID NO: 282559 - protein, 15 aa, Artificial Sequence
  Description of Artificial Sequence: Synthetic peptide
  Seed: HIHIFSFTGEEMATK
HIHYFSHTIEEVATK

SEQ ID NO: 282560 - protein, 15 aa, Artificial Sequence
  Description of Artificial Sequence: Synthetic peptide
  Seed: HIHIFSFTGEEMATK
HIHYFSHTLEEFATK

SEQ ID NO: 282561 - protein, 15 aa, Artificial Sequence
  Description of Artificial Sequence: Synthetic peptide
  Seed: HIHIFSFTGEEMATK
HIHYFSHTLEEIATK

SEQ ID NO: 282562 - protein, 15 aa, Artificial Sequence
  Description of Artificial Sequence: Synthetic peptide
  Seed: HIHIFSFTGEEMATK
HIHYFSHTLEELATK

SEQ ID NO: 282563 - protein, 15 aa, Artificial Sequence
  Description of Artificial Sequence: Synthetic peptide
  Seed: HIHIFSFTGEEMATK
HIHYFSHTLEEMATK

SEQ ID NO: 282564 - protein, 15 aa, Artificial Sequence
  Description of Artificial Sequence: Synthetic peptide
  Seed: HIHIFSFTGEEMATK
HIHYFSHTLEEVATK

SEQ ID NO: 282565 - protein, 15 aa, Artificial Sequence
  Description of Artificial Sequence: Synthetic peptide
  Seed: HIHIFSFTGEEMATK
HIHYFSHTMEEIATK

SEQ ID NO: 282566 - protein, 15 aa, Artificial Sequence
  Description of Artificial Sequence: Synthetic peptide
  Seed: HIHIFSFTGEEMATK
HIHYFSHTMEELATK

SEQ ID NO: 282567 - protein, 15 aa, Artificial Sequence
  Description of Artificial Sequence: Synthetic peptide
  Seed: HIHIFSFTGEEMATK
HIHYFSHTMEEVATK

SEQ ID NO: 282568 - protein, 15 aa, Artificial Sequence
  Description of Artificial Sequence: Synthetic peptide
  Seed: HIHIFSFTGEEMATK
HIHYFSHTWEEFATK

SEQ ID NO: 282569 - protein, 15 aa, Artificial Sequence
  Description of Artificial Sequence: Synthetic peptide
  Seed: HIHIFSFTGEEMATK
HIHYFSHTWEEIATK

SEQ ID NO: 282570 - protein, 15 aa, Artificial Sequence
  Description of Artificial Sequence: Synthetic peptide
  Seed: HIHIFSFTGEEMATK
HIHYFSHTWEELATK

SEQ ID NO: 282571 - protein, 15 aa, Artificial Sequence
  Description of Artificial Sequence: Synthetic peptide
  Seed: HIHIFSFTGEEMATK
HIHYFSHTWEEVATK

SEQ ID NO: 282572 - protein, 15 aa, Artificial Sequence
  Description of Artificial Sequence: Synthetic peptide
  Seed: HIHIFSFTGEEMATK
HIHYFSHTYEEFATK

SEQ ID NO: 282573 - protein, 15 aa, Artificial Sequence
  Description of Artificial Sequence: Synthetic peptide
  Seed: HIHIFSFTGEEMATK
HIHYFSHTYEEIATK

SEQ ID NO: 282574 - protein, 15 aa, Artificial Sequence
  Description of Artificial Sequence: Synthetic peptide
  Seed: HIHIFSFTGEEMATK
HIHYFSHTYEELATK

SEQ ID NO: 282575 - protein, 15 aa, Artificial Sequence
  Description of Artificial Sequence: Synthetic peptide
  Seed: HIHIFSFTGEEMATK
HIHYFSHTYEEMATK

SEQ ID NO: 282576 - protein, 15 aa, Artificial Sequence
  Description of Artificial Sequence: Synthetic peptide
  Seed: HIHIFSFTGEEMATK
HIHYFSHTYEEVATK

SEQ ID NO: 282577 - protein, 15 aa, Artificial Sequence
  Description of Artificial Sequence: Synthetic peptide
  Seed: HIHIFSFTGEEMATK
HIHYFSITAEEAATK

SEQ ID NO: 282578 - protein, 15 aa, Artificial Sequence
  Description of Artificial Sequence: Synthetic peptide
  Seed: HIHIFSFTGEEMATK
HIHYFSITAEEGATK

SEQ ID NO: 282579 - protein, 15 aa, Artificial Sequence
  Description of Artificial Sequence: Synthetic peptide
  Seed: HIHIFSFTGEEMATK
HIHYFSITAEEHATK

SEQ ID NO: 282580 - protein, 15 aa, Artificial Sequence
  Description of Artificial Sequence: Synthetic peptide
  Seed: HIHIFSFTGEEMATK
HIHYFSITAEEIATK

SEQ ID NO: 282581 - protein, 15 aa, Artificial Sequence
  Description of Artificial Sequence: Synthetic peptide
  Seed: HIHIFSFTGEEMATK
HIHYFSITAEELATK

SEQ ID NO: 282582 - protein, 15 aa, Artificial Sequence
  Description of Artificial Sequence: Synthetic peptide
  Seed: HIHIFSFTGEEMATK
HIHYFSITAEEMATK

SEQ ID NO: 282583 - protein, 15 aa, Artificial Sequence
  Description of Artificial Sequence: Synthetic peptide
  Seed: HIHIFSFTGEEMATK
HIHYFSITAEENATK

SEQ ID NO: 282584 - protein, 15 aa, Artificial Sequence
  Description of Artificial Sequence: Synthetic peptide
  Seed: HIHIFSFTGEEMATK
HIHYFSITAEEPATK

SEQ ID NO: 282585 - protein, 15 aa, Artificial Sequence
  Description of Artificial Sequence: Synthetic peptide
  Seed: HIHIFSFTGEEMATK
HIHYFSITAEEQATK

SEQ ID NO: 282586 - protein, 15 aa, Artificial Sequence
  Description of Artificial Sequence: Synthetic peptide
  Seed: HIHIFSFTGEEMATK
HIHYFSITAEESATK

SEQ ID NO: 282587 - protein, 15 aa, Artificial Sequence
  Description of Artificial Sequence: Synthetic peptide
  Seed: HIHIFSFTGEEMATK
HIHYFSITAEETATK

SEQ ID NO: 282588 - protein, 15 aa, Artificial Sequence
  Description of Artificial Sequence: Synthetic peptide
  Seed: HIHIFSFTGEEMATK
HIHYFSITAEEVATK

SEQ ID NO: 282589 - protein, 15 aa, Artificial Sequence
  Description of Artificial Sequence: Synthetic peptide
  Seed: HIHIFSFTGEEMATK
HIHYFSITFEEAATK

SEQ ID NO: 282590 - protein, 15 aa, Artificial Sequence
  Description of Artificial Sequence: Synthetic peptide
  Seed: HIHIFSFTGEEMATK
HIHYFSITFEEDATK

SEQ ID NO: 282591 - protein, 15 aa, Artificial Sequence
  Description of Artificial Sequence: Synthetic peptide
  Seed: HIHIFSFTGEEMATK
HIHYFSITFEEEATK

SEQ ID NO: 282592 - protein, 15 aa, Artificial Sequence
  Description of Artificial Sequence: Synthetic peptide
  Seed: HIHIFSFTGEEMATK
HIHYFSITFEEFATK

SEQ ID NO: 282593 - protein, 15 aa, Artificial Sequence
  Description of Artificial Sequence: Synthetic peptide
  Seed: HIHIFSFTGEEMATK
HIHYFSITFEEHATK

SEQ ID NO: 282594 - protein, 15 aa, Artificial Sequence
  Description of Artificial Sequence: Synthetic peptide
  Seed: HIHIFSFTGEEMATK
HIHYFSITFEEIATK

SEQ ID NO: 282595 - protein, 15 aa, Artificial Sequence
  Description of Artificial Sequence: Synthetic peptide
  Seed: HIHIFSFTGEEMATK
HIHYFSITFEEKATK

SEQ ID NO: 282596 - protein, 15 aa, Artificial Sequence
  Description of Artificial Sequence: Synthetic peptide
  Seed: HIHIFSFTGEEMATK
HIHYFSITFEELATK

SEQ ID NO: 282597 - protein, 15 aa, Artificial Sequence
  Description of Artificial Sequence: Synthetic peptide
  Seed: HIHIFSFTGEEMATK
HIHYFSITFEEMATK

SEQ ID NO: 282598 - protein, 15 aa, Artificial Sequence
  Description of Artificial Sequence: Synthetic peptide
  Seed: HIHIFSFTGEEMATK
HIHYFSITFEENATK

SEQ ID NO: 282599 - protein, 15 aa, Artificial Sequence
  Description of Artificial Sequence: Synthetic peptide
  Seed: HIHIFSFTGEEMATK
HIHYFSITFEEPATK

SEQ ID NO: 282600 - protein, 15 aa, Artificial Sequence
  Description of Artificial Sequence: Synthetic peptide
  Seed: HIHIFSFTGEEMATK
HIHYFSITFEEQATK

SEQ ID NO: 282601 - protein, 15 aa, Artificial Sequence
  Description of Artificial Sequence: Synthetic peptide
  Seed: HIHIFSFTGEEMATK
HIHYFSITFEERATK

SEQ ID NO: 282602 - protein, 15 aa, Artificial Sequence
  Description of Artificial Sequence: Synthetic peptide
  Seed: HIHIFSFTGEEMATK
HIHYFSITFEESATK

SEQ ID NO: 282603 - protein, 15 aa, Artificial Sequence
  Description of Artificial Sequence: Synthetic peptide
  Seed: HIHIFSFTGEEMATK
HIHYFSITFEETATK

SEQ ID NO: 282604 - protein, 15 aa, Artificial Sequence
  Description of Artificial Sequence: Synthetic peptide
  Seed: HIHIFSFTGEEMATK
HIHYFSITFEEVATK

SEQ ID NO: 282605 - protein, 15 aa, Artificial Sequence
  Description of Artificial Sequence: Synthetic peptide
  Seed: HIHIFSFTGEEMATK
HIHYFSITFEEWATK

SEQ ID NO: 282606 - protein, 15 aa, Artificial Sequence
  Description of Artificial Sequence: Synthetic peptide
  Seed: HIHIFSFTGEEMATK
HIHYFSITFEEYATK

SEQ ID NO: 282607 - protein, 15 aa, Artificial Sequence
  Description of Artificial Sequence: Synthetic peptide
  Seed: HIHIFSFTGEEMATK
HIHYFSITGEEAATK

SEQ ID NO: 282608 - protein, 15 aa, Artificial Sequence
  Description of Artificial Sequence: Synthetic peptide
  Seed: HIHIFSFTGEEMATK
HIHYFSITGEEGATK

SEQ ID NO: 282609 - protein, 15 aa, Artificial Sequence
  Description of Artificial Sequence: Synthetic peptide
  Seed: HIHIFSFTGEEMATK
HIHYFSITGEEHATK

SEQ ID NO: 282610 - protein, 15 aa, Artificial Sequence
  Description of Artificial Sequence: Synthetic peptide
  Seed: HIHIFSFTGEEMATK
HIHYFSITGEEIATK

SEQ ID NO: 282611 - protein, 15 aa, Artificial Sequence
  Description of Artificial Sequence: Synthetic peptide
  Seed: HIHIFSFTGEEMATK
HIHYFSITGEELATK

SEQ ID NO: 282612 - protein, 15 aa, Artificial Sequence
  Description of Artificial Sequence: Synthetic peptide
  Seed: HIHIFSFTGEEMATK
HIHYFSITGEEMATK

SEQ ID NO: 282613 - protein, 15 aa, Artificial Sequence
  Description of Artificial Sequence: Synthetic peptide
  Seed: HIHIFSFTGEEMATK
HIHYFSITGEENATK

SEQ ID NO: 282614 - protein, 15 aa, Artificial Sequence
  Description of Artificial Sequence: Synthetic peptide
  Seed: HIHIFSFTGEEMATK
HIHYFSITGEESATK

SEQ ID NO: 282615 - protein, 15 aa, Artificial Sequence
  Description of Artificial Sequence: Synthetic peptide
  Seed: HIHIFSFTGEEMATK
HIHYFSITGEETATK

SEQ ID NO: 282616 - protein, 15 aa, Artificial Sequence
  Description of Artificial Sequence: Synthetic peptide
  Seed: HIHIFSFTGEEMATK
HIHYFSITGEEVATK

SEQ ID NO: 282617 - protein, 15 aa, Artificial Sequence
  Description of Artificial Sequence: Synthetic peptide
  Seed: HIHIFSFTGEEMATK
HIHYFSITIEEAATK

SEQ ID NO: 282618 - protein, 15 aa, Artificial Sequence
  Description of Artificial Sequence: Synthetic peptide
  Seed: HIHIFSFTGEEMATK
HIHYFSITIEEFATK

SEQ ID NO: 282619 - protein, 15 aa, Artificial Sequence
  Description of Artificial Sequence: Synthetic peptide
  Seed: HIHIFSFTGEEMATK
HIHYFSITIEEGATK

SEQ ID NO: 282620 - protein, 15 aa, Artificial Sequence
  Description of Artificial Sequence: Synthetic peptide
  Seed: HIHIFSFTGEEMATK
HIHYFSITIEEHATK

SEQ ID NO: 282621 - protein, 15 aa, Artificial Sequence
  Description of Artificial Sequence: Synthetic peptide
  Seed: HIHIFSFTGEEMATK
HIHYFSITIEEIATK

SEQ ID NO: 282622 - protein, 15 aa, Artificial Sequence
  Description of Artificial Sequence: Synthetic peptide
  Seed: HIHIFSFTGEEMATK
HIHYFSITIEELATK

SEQ ID NO: 282623 - protein, 15 aa, Artificial Sequence
  Description of Artificial Sequence: Synthetic peptide
  Seed: HIHIFSFTGEEMATK
HIHYFSITIEEMATK

SEQ ID NO: 282624 - protein, 15 aa, Artificial Sequence
  Description of Artificial Sequence: Synthetic peptide
  Seed: HIHIFSFTGEEMATK
HIHYFSITIEENATK

SEQ ID NO: 282625 - protein, 15 aa, Artificial Sequence
  Description of Artificial Sequence: Synthetic peptide
  Seed: HIHIFSFTGEEMATK
HIHYFSITIEEPATK

SEQ ID NO: 282626 - protein, 15 aa, Artificial Sequence
  Description of Artificial Sequence: Synthetic peptide
  Seed: HIHIFSFTGEEMATK
HIHYFSITIEEQATK

SEQ ID NO: 282627 - protein, 15 aa, Artificial Sequence
  Description of Artificial Sequence: Synthetic peptide
  Seed: HIHIFSFTGEEMATK
HIHYFSITIEESATK

SEQ ID NO: 282628 - protein, 15 aa, Artificial Sequence
  Description of Artificial Sequence: Synthetic peptide
  Seed: HIHIFSFTGEEMATK
HIHYFSITIEETATK

SEQ ID NO: 282629 - protein, 15 aa, Artificial Sequence
  Description of Artificial Sequence: Synthetic peptide
  Seed: HIHIFSFTGEEMATK
HIHYFSITIEEVATK

SEQ ID NO: 282630 - protein, 15 aa, Artificial Sequence
  Description of Artificial Sequence: Synthetic peptide
  Seed: HIHIFSFTGEEMATK
HIHYFSITLEEAATK

SEQ ID NO: 282631 - protein, 15 aa, Artificial Sequence
  Description of Artificial Sequence: Synthetic peptide
  Seed: HIHIFSFTGEEMATK
HIHYFSITLEEFATK

SEQ ID NO: 282632 - protein, 15 aa, Artificial Sequence
  Description of Artificial Sequence: Synthetic peptide
  Seed: HIHIFSFTGEEMATK
HIHYFSITLEEIATK

SEQ ID NO: 282633 - protein, 15 aa, Artificial Sequence
  Description of Artificial Sequence: Synthetic peptide
  Seed: HIHIFSFTGEEMATK
HIHYFSITLEELATK

SEQ ID NO: 282634 - protein, 15 aa, Artificial Sequence
  Description of Artificial Sequence: Synthetic peptide
  Seed: HIHIFSFTGEEMATK
HIHYFSITLEEMATK

SEQ ID NO: 282635 - protein, 15 aa, Artificial Sequence
  Description of Artificial Sequence: Synthetic peptide
  Seed: HIHIFSFTGEEMATK
HIHYFSITLEENATK

SEQ ID NO: 282636 - protein, 15 aa, Artificial Sequence
  Description of Artificial Sequence: Synthetic peptide
  Seed: HIHIFSFTGEEMATK
HIHYFSITLEESATK

SEQ ID NO: 282637 - protein, 15 aa, Artificial Sequence
  Description of Artificial Sequence: Synthetic peptide
  Seed: HIHIFSFTGEEMATK
HIHYFSITLEETATK

SEQ ID NO: 282638 - protein, 15 aa, Artificial Sequence
  Description of Artificial Sequence: Synthetic peptide
  Seed: HIHIFSFTGEEMATK
HIHYFSITLEEVATK

SEQ ID NO: 282639 - protein, 15 aa, Artificial Sequence
  Description of Artificial Sequence: Synthetic peptide
  Seed: HIHIFSFTGEEMATK
HIHYFSITLEEYATK

SEQ ID NO: 282640 - protein, 15 aa, Artificial Sequence
  Description of Artificial Sequence: Synthetic peptide
  Seed: HIHIFSFTGEEMATK
HIHYFSITMEEAATK

SEQ ID NO: 282641 - protein, 15 aa, Artificial Sequence
  Description of Artificial Sequence: Synthetic peptide
  Seed: HIHIFSFTGEEMATK
HIHYFSITMEEFATK

SEQ ID NO: 282642 - protein, 15 aa, Artificial Sequence
  Description of Artificial Sequence: Synthetic peptide
  Seed: HIHIFSFTGEEMATK
HIHYFSITMEEHATK

SEQ ID NO: 282643 - protein, 15 aa, Artificial Sequence
  Description of Artificial Sequence: Synthetic peptide
  Seed: HIHIFSFTGEEMATK
HIHYFSITMEEIATK

SEQ ID NO: 282644 - protein, 15 aa, Artificial Sequence
  Description of Artificial Sequence: Synthetic peptide
  Seed: HIHIFSFTGEEMATK
HIHYFSITMEELATK

SEQ ID NO: 282645 - protein, 15 aa, Artificial Sequence
  Description of Artificial Sequence: Synthetic peptide
  Seed: HIHIFSFTGEEMATK
HIHYFSITMEEMATK

SEQ ID NO: 282646 - protein, 15 aa, Artificial Sequence
  Description of Artificial Sequence: Synthetic peptide
  Seed: HIHIFSFTGEEMATK
HIHYFSITMEENATK

SEQ ID NO: 282647 - protein, 15 aa, Artificial Sequence
  Description of Artificial Sequence: Synthetic peptide
  Seed: HIHIFSFTGEEMATK
HIHYFSITMEESATK

SEQ ID NO: 282648 - protein, 15 aa, Artificial Sequence
  Description of Artificial Sequence: Synthetic peptide
  Seed: HIHIFSFTGEEMATK
HIHYFSITMEETATK

SEQ ID NO: 282649 - protein, 15 aa, Artificial Sequence
  Description of Artificial Sequence: Synthetic peptide
  Seed: HIHIFSFTGEEMATK
HIHYFSITMEEVATK

SEQ ID NO: 282650 - protein, 15 aa, Artificial Sequence
  Description of Artificial Sequence: Synthetic peptide
  Seed: HIHIFSFTGEEMATK
HIHYFSITNEEAATK

SEQ ID NO: 282651 - protein, 15 aa, Artificial Sequence
  Description of Artificial Sequence: Synthetic peptide
  Seed: HIHIFSFTGEEMATK
HIHYFSITNEEIATK

SEQ ID NO: 282652 - protein, 15 aa, Artificial Sequence
  Description of Artificial Sequence: Synthetic peptide
  Seed: HIHIFSFTGEEMATK
HIHYFSITNEELATK

SEQ ID NO: 282653 - protein, 15 aa, Artificial Sequence
  Description of Artificial Sequence: Synthetic peptide
  Seed: HIHIFSFTGEEMATK
HIHYFSITNEEMATK

SEQ ID NO: 282654 - protein, 15 aa, Artificial Sequence
  Description of Artificial Sequence: Synthetic peptide
  Seed: HIHIFSFTGEEMATK
HIHYFSITNEESATK

SEQ ID NO: 282655 - protein, 15 aa, Artificial Sequence
  Description of Artificial Sequence: Synthetic peptide
  Seed: HIHIFSFTGEEMATK
HIHYFSITNEETATK

SEQ ID NO: 282656 - protein, 15 aa, Artificial Sequence
  Description of Artificial Sequence: Synthetic peptide
  Seed: HIHIFSFTGEEMATK
HIHYFSITNEEVATK

SEQ ID NO: 282657 - protein, 15 aa, Artificial Sequence
  Description of Artificial Sequence: Synthetic peptide
  Seed: HIHIFSFTGEEMATK
HIHYFSITPEEAATK

SEQ ID NO: 282658 - protein, 15 aa, Artificial Sequence
  Description of Artificial Sequence: Synthetic peptide
  Seed: HIHIFSFTGEEMATK
HIHYFSITPEEGATK

SEQ ID NO: 282659 - protein, 15 aa, Artificial Sequence
  Description of Artificial Sequence: Synthetic peptide
  Seed: HIHIFSFTGEEMATK
HIHYFSITPEEHATK

SEQ ID NO: 282660 - protein, 15 aa, Artificial Sequence
  Description of Artificial Sequence: Synthetic peptide
  Seed: HIHIFSFTGEEMATK
HIHYFSITPEEIATK

SEQ ID NO: 282661 - protein, 15 aa, Artificial Sequence
  Description of Artificial Sequence: Synthetic peptide
  Seed: HIHIFSFTGEEMATK
HIHYFSITPEELATK

SEQ ID NO: 282662 - protein, 15 aa, Artificial Sequence
  Description of Artificial Sequence: Synthetic peptide
  Seed: HIHIFSFTGEEMATK
HIHYFSITPEEMATK

SEQ ID NO: 282663 - protein, 15 aa, Artificial Sequence
  Description of Artificial Sequence: Synthetic peptide
  Seed: HIHIFSFTGEEMATK
HIHYFSITPEENATK

SEQ ID NO: 282664 - protein, 15 aa, Artificial Sequence
  Description of Artificial Sequence: Synthetic peptide
  Seed: HIHIFSFTGEEMATK
HIHYFSITPEEPATK

SEQ ID NO: 282665 - protein, 15 aa, Artificial Sequence
  Description of Artificial Sequence: Synthetic peptide
  Seed: HIHIFSFTGEEMATK
HIHYFSITPEEQATK

SEQ ID NO: 282666 - protein, 15 aa, Artificial Sequence
  Description of Artificial Sequence: Synthetic peptide
  Seed: HIHIFSFTGEEMATK
HIHYFSITPEESATK

SEQ ID NO: 282667 - protein, 15 aa, Artificial Sequence
  Description of Artificial Sequence: Synthetic peptide
  Seed: HIHIFSFTGEEMATK
HIHYFSITPEETATK

SEQ ID NO: 282668 - protein, 15 aa, Artificial Sequence
  Description of Artificial Sequence: Synthetic peptide
  Seed: HIHIFSFTGEEMATK
HIHYFSITPEEVATK

SEQ ID NO: 282669 - protein, 15 aa, Artificial Sequence
  Description of Artificial Sequence: Synthetic peptide
  Seed: HIHIFSFTGEEMATK
HIHYFSITSEEAATK

SEQ ID NO: 282670 - protein, 15 aa, Artificial Sequence
  Description of Artificial Sequence: Synthetic peptide
  Seed: HIHIFSFTGEEMATK
HIHYFSITSEEGATK

SEQ ID NO: 282671 - protein, 15 aa, Artificial Sequence
  Description of Artificial Sequence: Synthetic peptide
  Seed: HIHIFSFTGEEMATK
HIHYFSITSEEHATK

SEQ ID NO: 282672 - protein, 15 aa, Artificial Sequence
  Description of Artificial Sequence: Synthetic peptide
  Seed: HIHIFSFTGEEMATK
HIHYFSITSEEIATK

SEQ ID NO: 282673 - protein, 15 aa, Artificial Sequence
  Description of Artificial Sequence: Synthetic peptide
  Seed: HIHIFSFTGEEMATK
HIHYFSITSEELATK

SEQ ID NO: 282674 - protein, 15 aa, Artificial Sequence
  Description of Artificial Sequence: Synthetic peptide
  Seed: HIHIFSFTGEEMATK
HIHYFSITSEEMATK

SEQ ID NO: 282675 - protein, 15 aa, Artificial Sequence
  Description of Artificial Sequence: Synthetic peptide
  Seed: HIHIFSFTGEEMATK
HIHYFSITSEENATK

SEQ ID NO: 282676 - protein, 15 aa, Artificial Sequence
  Description of Artificial Sequence: Synthetic peptide
  Seed: HIHIFSFTGEEMATK
HIHYFSITSEEPATK

SEQ ID NO: 282677 - protein, 15 aa, Artificial Sequence
  Description of Artificial Sequence: Synthetic peptide
  Seed: HIHIFSFTGEEMATK
HIHYFSITSEEQATK

SEQ ID NO: 282678 - protein, 15 aa, Artificial Sequence
  Description of Artificial Sequence: Synthetic peptide
  Seed: HIHIFSFTGEEMATK
HIHYFSITSEESATK

SEQ ID NO: 282679 - protein, 15 aa, Artificial Sequence
  Description of Artificial Sequence: Synthetic peptide
  Seed: HIHIFSFTGEEMATK
HIHYFSITSEETATK

SEQ ID NO: 282680 - protein, 15 aa, Artificial Sequence
  Description of Artificial Sequence: Synthetic peptide
  Seed: HIHIFSFTGEEMATK
HIHYFSITSEEVATK

SEQ ID NO: 282681 - protein, 15 aa, Artificial Sequence
  Description of Artificial Sequence: Synthetic peptide
  Seed: HIHIFSFTGEEMATK
HIHYFSITTEEAATK

SEQ ID NO: 282682 - protein, 15 aa, Artificial Sequence
  Description of Artificial Sequence: Synthetic peptide
  Seed: HIHIFSFTGEEMATK
HIHYFSITTEEGATK

SEQ ID NO: 282683 - protein, 15 aa, Artificial Sequence
  Description of Artificial Sequence: Synthetic peptide
  Seed: HIHIFSFTGEEMATK
HIHYFSITTEEHATK

SEQ ID NO: 282684 - protein, 15 aa, Artificial Sequence
  Description of Artificial Sequence: Synthetic peptide
  Seed: HIHIFSFTGEEMATK
HIHYFSITTEEIATK

SEQ ID NO: 282685 - protein, 15 aa, Artificial Sequence
  Description of Artificial Sequence: Synthetic peptide
  Seed: HIHIFSFTGEEMATK
HIHYFSITTEELATK

SEQ ID NO: 282686 - protein, 15 aa, Artificial Sequence
  Description of Artificial Sequence: Synthetic peptide
  Seed: HIHIFSFTGEEMATK
HIHYFSITTEEMATK

SEQ ID NO: 282687 - protein, 15 aa, Artificial Sequence
  Description of Artificial Sequence: Synthetic peptide
  Seed: HIHIFSFTGEEMATK
HIHYFSITTEENATK

SEQ ID NO: 282688 - protein, 15 aa, Artificial Sequence
  Description of Artificial Sequence: Synthetic peptide
  Seed: HIHIFSFTGEEMATK
HIHYFSITTEESATK

SEQ ID NO: 282689 - protein, 15 aa, Artificial Sequence
  Description of Artificial Sequence: Synthetic peptide
  Seed: HIHIFSFTGEEMATK
HIHYFSITTEETATK

SEQ ID NO: 282690 - protein, 15 aa, Artificial Sequence
  Description of Artificial Sequence: Synthetic peptide
  Seed: HIHIFSFTGEEMATK
HIHYFSITTEEVATK

SEQ ID NO: 282691 - protein, 15 aa, Artificial Sequence
  Description of Artificial Sequence: Synthetic peptide
  Seed: HIHIFSFTGEEMATK
HIHYFSITVEEAATK

SEQ ID NO: 282692 - protein, 15 aa, Artificial Sequence
  Description of Artificial Sequence: Synthetic peptide
  Seed: HIHIFSFTGEEMATK
HIHYFSITVEEGATK

SEQ ID NO: 282693 - protein, 15 aa, Artificial Sequence
  Description of Artificial Sequence: Synthetic peptide
  Seed: HIHIFSFTGEEMATK
HIHYFSITVEEHATK

SEQ ID NO: 282694 - protein, 15 aa, Artificial Sequence
  Description of Artificial Sequence: Synthetic peptide
  Seed: HIHIFSFTGEEMATK
HIHYFSITVEEIATK

SEQ ID NO: 282695 - protein, 15 aa, Artificial Sequence
  Description of Artificial Sequence: Synthetic peptide
  Seed: HIHIFSFTGEEMATK
HIHYFSITVEELATK

SEQ ID NO: 282696 - protein, 15 aa, Artificial Sequence
  Description of Artificial Sequence: Synthetic peptide
  Seed: HIHIFSFTGEEMATK
HIHYFSITVEEMATK

SEQ ID NO: 282697 - protein, 15 aa, Artificial Sequence
  Description of Artificial Sequence: Synthetic peptide
  Seed: HIHIFSFTGEEMATK
HIHYFSITVEENATK

SEQ ID NO: 282698 - protein, 15 aa, Artificial Sequence
  Description of Artificial Sequence: Synthetic peptide
  Seed: HIHIFSFTGEEMATK
HIHYFSITVEEPATK

SEQ ID NO: 282699 - protein, 15 aa, Artificial Sequence
  Description of Artificial Sequence: Synthetic peptide
  Seed: HIHIFSFTGEEMATK
HIHYFSITVEEQATK

SEQ ID NO: 282700 - protein, 15 aa, Artificial Sequence
  Description of Artificial Sequence: Synthetic peptide
  Seed: HIHIFSFTGEEMATK
HIHYFSITVEESATK

SEQ ID NO: 282701 - protein, 15 aa, Artificial Sequence
  Description of Artificial Sequence: Synthetic peptide
  Seed: HIHIFSFTGEEMATK
HIHYFSITVEETATK

SEQ ID NO: 282702 - protein, 15 aa, Artificial Sequence
  Description of Artificial Sequence: Synthetic peptide
  Seed: HIHIFSFTGEEMATK
HIHYFSITVEEVATK

SEQ ID NO: 282703 - protein, 15 aa, Artificial Sequence
  Description of Artificial Sequence: Synthetic peptide
  Seed: HIHIFSFTGEEMATK
HIHYFSITWEEFATK

SEQ ID NO: 282704 - protein, 15 aa, Artificial Sequence
  Description of Artificial Sequence: Synthetic peptide
  Seed: HIHIFSFTGEEMATK
HIHYFSITWEEIATK

SEQ ID NO: 282705 - protein, 15 aa, Artificial Sequence
  Description of Artificial Sequence: Synthetic peptide
  Seed: HIHIFSFTGEEMATK
HIHYFSITWEELATK

SEQ ID NO: 282706 - protein, 15 aa, Artificial Sequence
  Description of Artificial Sequence: Synthetic peptide
  Seed: HIHIFSFTGEEMATK
HIHYFSITWEEMATK

SEQ ID NO: 282707 - protein, 15 aa, Artificial Sequence
  Description of Artificial Sequence: Synthetic peptide
  Seed: HIHIFSFTGEEMATK
HIHYFSITWEEVATK

SEQ ID NO: 282708 - protein, 15 aa, Artificial Sequence
  Description of Artificial Sequence: Synthetic peptide
  Seed: HIHIFSFTGEEMATK
HIHYFSITWEEYATK

SEQ ID NO: 282709 - protein, 15 aa, Artificial Sequence
  Description of Artificial Sequence: Synthetic peptide
  Seed: HIHIFSFTGEEMATK
HIHYFSITYEEAATK

SEQ ID NO: 282710 - protein, 15 aa, Artificial Sequence
  Description of Artificial Sequence: Synthetic peptide
  Seed: HIHIFSFTGEEMATK
HIHYFSITYEEFATK

SEQ ID NO: 282711 - protein, 15 aa, Artificial Sequence
  Description of Artificial Sequence: Synthetic peptide
  Seed: HIHIFSFTGEEMATK
HIHYFSITYEEIATK

SEQ ID NO: 282712 - protein, 15 aa, Artificial Sequence
  Description of Artificial Sequence: Synthetic peptide
  Seed: HIHIFSFTGEEMATK
HIHYFSITYEELATK

SEQ ID NO: 282713 - protein, 15 aa, Artificial Sequence
  Description of Artificial Sequence: Synthetic peptide
  Seed: HIHIFSFTGEEMATK
HIHYFSITYEEMATK

SEQ ID NO: 282714 - protein, 15 aa, Artificial Sequence
  Description of Artificial Sequence: Synthetic peptide
  Seed: HIHIFSFTGEEMATK
HIHYFSITYEETATK

SEQ ID NO: 282715 - protein, 15 aa, Artificial Sequence
  Description of Artificial Sequence: Synthetic peptide
  Seed: HIHIFSFTGEEMATK
HIHYFSITYEEVATK

SEQ ID NO: 282716 - protein, 15 aa, Artificial Sequence
  Description of Artificial Sequence: Synthetic peptide
  Seed: HIHIFSFTGEEMATK
HIHYFSITYEEYATK

SEQ ID NO: 282717 - protein, 15 aa, Artificial Sequence
  Description of Artificial Sequence: Synthetic peptide
  Seed: HIHIFSFTGEEMATK
HIHYFSKTFEEAATK

SEQ ID NO: 282718 - protein, 15 aa, Artificial Sequence
  Description of Artificial Sequence: Synthetic peptide
  Seed: HIHIFSFTGEEMATK
HIHYFSKTFEEFATK

SEQ ID NO: 282719 - protein, 15 aa, Artificial Sequence
  Description of Artificial Sequence: Synthetic peptide
  Seed: HIHIFSFTGEEMATK
HIHYFSKTFEEIATK

SEQ ID NO: 282720 - protein, 15 aa, Artificial Sequence
  Description of Artificial Sequence: Synthetic peptide
  Seed: HIHIFSFTGEEMATK
HIHYFSKTFEELATK

SEQ ID NO: 282721 - protein, 15 aa, Artificial Sequence
  Description of Artificial Sequence: Synthetic peptide
  Seed: HIHIFSFTGEEMATK
HIHYFSKTFEEMATK

SEQ ID NO: 282722 - protein, 15 aa, Artificial Sequence
  Description of Artificial Sequence: Synthetic peptide
  Seed: HIHIFSFTGEEMATK
HIHYFSKTFEETATK

SEQ ID NO: 282723 - protein, 15 aa, Artificial Sequence
  Description of Artificial Sequence: Synthetic peptide
  Seed: HIHIFSFTGEEMATK
HIHYFSKTFEEVATK

SEQ ID NO: 282724 - protein, 15 aa, Artificial Sequence
  Description of Artificial Sequence: Synthetic peptide
  Seed: HIHIFSFTGEEMATK
HIHYFSKTLEELATK

SEQ ID NO: 282725 - protein, 15 aa, Artificial Sequence
  Description of Artificial Sequence: Synthetic peptide
  Seed: HIHIFSFTGEEMATK
HIHYFSKTWEELATK

SEQ ID NO: 282726 - protein, 15 aa, Artificial Sequence
  Description of Artificial Sequence: Synthetic peptide
  Seed: HIHIFSFTGEEMATK
HIHYFSKTYEEIATK

SEQ ID NO: 282727 - protein, 15 aa, Artificial Sequence
  Description of Artificial Sequence: Synthetic peptide
  Seed: HIHIFSFTGEEMATK
HIHYFSKTYEELATK

SEQ ID NO: 282728 - protein, 15 aa, Artificial Sequence
  Description of Artificial Sequence: Synthetic peptide
  Seed: HIHIFSFTGEEMATK
HIHYFSLTAEEAATK

SEQ ID NO: 282729 - protein, 15 aa, Artificial Sequence
  Description of Artificial Sequence: Synthetic peptide
  Seed: HIHIFSFTGEEMATK
HIHYFSLTAEECATK

SEQ ID NO: 282730 - protein, 15 aa, Artificial Sequence
  Description of Artificial Sequence: Synthetic peptide
  Seed: HIHIFSFTGEEMATK
HIHYFSLTAEEDATK

SEQ ID NO: 282731 - protein, 15 aa, Artificial Sequence
  Description of Artificial Sequence: Synthetic peptide
  Seed: HIHIFSFTGEEMATK
HIHYFSLTAEEEATK

SEQ ID NO: 282732 - protein, 15 aa, Artificial Sequence
  Description of Artificial Sequence: Synthetic peptide
  Seed: HIHIFSFTGEEMATK
HIHYFSLTAEEFATK

SEQ ID NO: 282733 - protein, 15 aa, Artificial Sequence
  Description of Artificial Sequence: Synthetic peptide
  Seed: HIHIFSFTGEEMATK
HIHYFSLTAEEGATK

SEQ ID NO: 282734 - protein, 15 aa, Artificial Sequence
  Description of Artificial Sequence: Synthetic peptide
  Seed: HIHIFSFTGEEMATK
HIHYFSLTAEEHATK

SEQ ID NO: 282735 - protein, 15 aa, Artificial Sequence
  Description of Artificial Sequence: Synthetic peptide
  Seed: HIHIFSFTGEEMATK
HIHYFSLTAEEIATK

SEQ ID NO: 282736 - protein, 15 aa, Artificial Sequence
  Description of Artificial Sequence: Synthetic peptide
  Seed: HIHIFSFTGEEMATK
HIHYFSLTAEEKATK

SEQ ID NO: 282737 - protein, 15 aa, Artificial Sequence
  Description of Artificial Sequence: Synthetic peptide
  Seed: HIHIFSFTGEEMATK
HIHYFSLTAEELATK

SEQ ID NO: 282738 - protein, 15 aa, Artificial Sequence
  Description of Artificial Sequence: Synthetic peptide
  Seed: HIHIFSFTGEEMATK
HIHYFSLTAEEMATK

SEQ ID NO: 282739 - protein, 15 aa, Artificial Sequence
  Description of Artificial Sequence: Synthetic peptide
  Seed: HIHIFSFTGEEMATK
HIHYFSLTAEENATK

SEQ ID NO: 282740 - protein, 15 aa, Artificial Sequence
  Description of Artificial Sequence: Synthetic peptide
  Seed: HIHIFSFTGEEMATK
HIHYFSLTAEEPATK

SEQ ID NO: 282741 - protein, 15 aa, Artificial Sequence
  Description of Artificial Sequence: Synthetic peptide
  Seed: HIHIFSFTGEEMATK
HIHYFSLTAEEQATK

SEQ ID NO: 282742 - protein, 15 aa, Artificial Sequence
  Description of Artificial Sequence: Synthetic peptide
  Seed: HIHIFSFTGEEMATK
HIHYFSLTAEERATK

SEQ ID NO: 282743 - protein, 15 aa, Artificial Sequence
  Description of Artificial Sequence: Synthetic peptide
  Seed: HIHIFSFTGEEMATK
HIHYFSLTAEESATK

SEQ ID NO: 282744 - protein, 15 aa, Artificial Sequence
  Description of Artificial Sequence: Synthetic peptide
  Seed: HIHIFSFTGEEMATK
HIHYFSLTAEETATK

SEQ ID NO: 282745 - protein, 15 aa, Artificial Sequence
  Description of Artificial Sequence: Synthetic peptide
  Seed: HIHIFSFTGEEMATK
HIHYFSLTAEEVATK

SEQ ID NO: 282746 - protein, 15 aa, Artificial Sequence
  Description of Artificial Sequence: Synthetic peptide
  Seed: HIHIFSFTGEEMATK
HIHYFSLTAEEWATK

SEQ ID NO: 282747 - protein, 15 aa, Artificial Sequence
  Description of Artificial Sequence: Synthetic peptide
  Seed: HIHIFSFTGEEMATK
HIHYFSLTAEEYATK

SEQ ID NO: 282748 - protein, 15 aa, Artificial Sequence
  Description of Artificial Sequence: Synthetic peptide
  Seed: HIHIFSFTGEEMATK
HIHYFSLTFEEAATK

SEQ ID NO: 282749 - protein, 15 aa, Artificial Sequence
  Description of Artificial Sequence: Synthetic peptide
  Seed: HIHIFSFTGEEMATK
HIHYFSLTFEEDATK

SEQ ID NO: 282750 - protein, 15 aa, Artificial Sequence
  Description of Artificial Sequence: Synthetic peptide
  Seed: HIHIFSFTGEEMATK
HIHYFSLTFEEEATK

SEQ ID NO: 282751 - protein, 15 aa, Artificial Sequence
  Description of Artificial Sequence: Synthetic peptide
  Seed: HIHIFSFTGEEMATK
HIHYFSLTFEEFATK

SEQ ID NO: 282752 - protein, 15 aa, Artificial Sequence
  Description of Artificial Sequence: Synthetic peptide
  Seed: HIHIFSFTGEEMATK
HIHYFSLTFEEHATK

SEQ ID NO: 282753 - protein, 15 aa, Artificial Sequence
  Description of Artificial Sequence: Synthetic peptide
  Seed: HIHIFSFTGEEMATK
HIHYFSLTFEEIATK

SEQ ID NO: 282754 - protein, 15 aa, Artificial Sequence
  Description of Artificial Sequence: Synthetic peptide
  Seed: HIHIFSFTGEEMATK
HIHYFSLTFEEKATK

SEQ ID NO: 282755 - protein, 15 aa, Artificial Sequence
  Description of Artificial Sequence: Synthetic peptide
  Seed: HIHIFSFTGEEMATK
HIHYFSLTFEELATK

SEQ ID NO: 282756 - protein, 15 aa, Artificial Sequence
  Description of Artificial Sequence: Synthetic peptide
  Seed: HIHIFSFTGEEMATK
HIHYFSLTFEEMATK

SEQ ID NO: 282757 - protein, 15 aa, Artificial Sequence
  Description of Artificial Sequence: Synthetic peptide
  Seed: HIHIFSFTGEEMATK
HIHYFSLTFEENATK

SEQ ID NO: 282758 - protein, 15 aa, Artificial Sequence
  Description of Artificial Sequence: Synthetic peptide
  Seed: HIHIFSFTGEEMATK
HIHYFSLTFEEPATK

SEQ ID NO: 282759 - protein, 15 aa, Artificial Sequence
  Description of Artificial Sequence: Synthetic peptide
  Seed: HIHIFSFTGEEMATK
HIHYFSLTFEERATK

SEQ ID NO: 282760 - protein, 15 aa, Artificial Sequence
  Description of Artificial Sequence: Synthetic peptide
  Seed: HIHIFSFTGEEMATK
HIHYFSLTFEESATK

SEQ ID NO: 282761 - protein, 15 aa, Artificial Sequence
  Description of Artificial Sequence: Synthetic peptide
  Seed: HIHIFSFTGEEMATK
HIHYFSLTFEETATK

SEQ ID NO: 282762 - protein, 15 aa, Artificial Sequence
  Description of Artificial Sequence: Synthetic peptide
  Seed: HIHIFSFTGEEMATK
HIHYFSLTFEEVATK

SEQ ID NO: 282763 - protein, 15 aa, Artificial Sequence
  Description of Artificial Sequence: Synthetic peptide
  Seed: HIHIFSFTGEEMATK
HIHYFSLTFEEWATK

SEQ ID NO: 282764 - protein, 15 aa, Artificial Sequence
  Description of Artificial Sequence: Synthetic peptide
  Seed: HIHIFSFTGEEMATK
HIHYFSLTFEEYATK

SEQ ID NO: 282765 - protein, 15 aa, Artificial Sequence
  Description of Artificial Sequence: Synthetic peptide
  Seed: HIHIFSFTGEEMATK
HIHYFSLTGEEAATK

SEQ ID NO: 282766 - protein, 15 aa, Artificial Sequence
  Description of Artificial Sequence: Synthetic peptide
  Seed: HIHIFSFTGEEMATK
HIHYFSLTGEEFATK

SEQ ID NO: 282767 - protein, 15 aa, Artificial Sequence
  Description of Artificial Sequence: Synthetic peptide
  Seed: HIHIFSFTGEEMATK
HIHYFSLTGEEGATK

SEQ ID NO: 282768 - protein, 15 aa, Artificial Sequence
  Description of Artificial Sequence: Synthetic peptide
  Seed: HIHIFSFTGEEMATK
HIHYFSLTGEEHATK

SEQ ID NO: 282769 - protein, 15 aa, Artificial Sequence
  Description of Artificial Sequence: Synthetic peptide
  Seed: HIHIFSFTGEEMATK
HIHYFSLTGEEIATK

SEQ ID NO: 282770 - protein, 15 aa, Artificial Sequence
  Description of Artificial Sequence: Synthetic peptide
  Seed: HIHIFSFTGEEMATK
HIHYFSLTGEELATK

SEQ ID NO: 282771 - protein, 15 aa, Artificial Sequence
  Description of Artificial Sequence: Synthetic peptide
  Seed: HIHIFSFTGEEMATK
HIHYFSLTGEEMATK

SEQ ID NO: 282772 - protein, 15 aa, Artificial Sequence
  Description of Artificial Sequence: Synthetic peptide
  Seed: HIHIFSFTGEEMATK
HIHYFSLTGEENATK

SEQ ID NO: 282773 - protein, 15 aa, Artificial Sequence
  Description of Artificial Sequence: Synthetic peptide
  Seed: HIHIFSFTGEEMATK
HIHYFSLTGEEPATK

SEQ ID NO: 282774 - protein, 15 aa, Artificial Sequence
  Description of Artificial Sequence: Synthetic peptide
  Seed: HIHIFSFTGEEMATK
HIHYFSLTGEESATK

SEQ ID NO: 282775 - protein, 15 aa, Artificial Sequence
  Description of Artificial Sequence: Synthetic peptide
  Seed: HIHIFSFTGEEMATK
HIHYFSLTGEETATK

SEQ ID NO: 282776 - protein, 15 aa, Artificial Sequence
  Description of Artificial Sequence: Synthetic peptide
  Seed: HIHIFSFTGEEMATK
HIHYFSLTGEEVATK

SEQ ID NO: 282777 - protein, 15 aa, Artificial Sequence
  Description of Artificial Sequence: Synthetic peptide
  Seed: HIHIFSFTGEEMATK
HIHYFSLTHEELATK

SEQ ID NO: 282778 - protein, 15 aa, Artificial Sequence
  Description of Artificial Sequence: Synthetic peptide
  Seed: HIHIFSFTGEEMATK
HIHYFSLTIEEAATK

SEQ ID NO: 282779 - protein, 15 aa, Artificial Sequence
  Description of Artificial Sequence: Synthetic peptide
  Seed: HIHIFSFTGEEMATK
HIHYFSLTIEEEATK

SEQ ID NO: 282780 - protein, 15 aa, Artificial Sequence
  Description of Artificial Sequence: Synthetic peptide
  Seed: HIHIFSFTGEEMATK
HIHYFSLTIEEFATK

SEQ ID NO: 282781 - protein, 15 aa, Artificial Sequence
  Description of Artificial Sequence: Synthetic peptide
  Seed: HIHIFSFTGEEMATK
HIHYFSLTIEEGATK

SEQ ID NO: 282782 - protein, 15 aa, Artificial Sequence
  Description of Artificial Sequence: Synthetic peptide
  Seed: HIHIFSFTGEEMATK
HIHYFSLTIEEHATK

SEQ ID NO: 282783 - protein, 15 aa, Artificial Sequence
  Description of Artificial Sequence: Synthetic peptide
  Seed: HIHIFSFTGEEMATK
HIHYFSLTIEEIATK

SEQ ID NO: 282784 - protein, 15 aa, Artificial Sequence
  Description of Artificial Sequence: Synthetic peptide
  Seed: HIHIFSFTGEEMATK
HIHYFSLTIEEKATK

SEQ ID NO: 282785 - protein, 15 aa, Artificial Sequence
  Description of Artificial Sequence: Synthetic peptide
  Seed: HIHIFSFTGEEMATK
HIHYFSLTIEELATK

SEQ ID NO: 282786 - protein, 15 aa, Artificial Sequence
  Description of Artificial Sequence: Synthetic peptide
  Seed: HIHIFSFTGEEMATK
HIHYFSLTIEEMATK

SEQ ID NO: 282787 - protein, 15 aa, Artificial Sequence
  Description of Artificial Sequence: Synthetic peptide
  Seed: HIHIFSFTGEEMATK
HIHYFSLTIEENATK

SEQ ID NO: 282788 - protein, 15 aa, Artificial Sequence
  Description of Artificial Sequence: Synthetic peptide
  Seed: HIHIFSFTGEEMATK
HIHYFSLTIEEPATK

SEQ ID NO: 282789 - protein, 15 aa, Artificial Sequence
  Description of Artificial Sequence: Synthetic peptide
  Seed: HIHIFSFTGEEMATK
HIHYFSLTIEEQATK

SEQ ID NO: 282790 - protein, 15 aa, Artificial Sequence
  Description of Artificial Sequence: Synthetic peptide
  Seed: HIHIFSFTGEEMATK
HIHYFSLTIEESATK

SEQ ID NO: 282791 - protein, 15 aa, Artificial Sequence
  Description of Artificial Sequence: Synthetic peptide
  Seed: HIHIFSFTGEEMATK
HIHYFSLTIEETATK

SEQ ID NO: 282792 - protein, 15 aa, Artificial Sequence
  Description of Artificial Sequence: Synthetic peptide
  Seed: HIHIFSFTGEEMATK
HIHYFSLTIEEVATK

SEQ ID NO: 282793 - protein, 15 aa, Artificial Sequence
  Description of Artificial Sequence: Synthetic peptide
  Seed: HIHIFSFTGEEMATK
HIHYFSLTLEEAATK

SEQ ID NO: 282794 - protein, 15 aa, Artificial Sequence
  Description of Artificial Sequence: Synthetic peptide
  Seed: HIHIFSFTGEEMATK
HIHYFSLTLEEFATK

SEQ ID NO: 282795 - protein, 15 aa, Artificial Sequence
  Description of Artificial Sequence: Synthetic peptide
  Seed: HIHIFSFTGEEMATK
HIHYFSLTLEEGATK

SEQ ID NO: 282796 - protein, 15 aa, Artificial Sequence
  Description of Artificial Sequence: Synthetic peptide
  Seed: HIHIFSFTGEEMATK
HIHYFSLTLEEHATK

SEQ ID NO: 282797 - protein, 15 aa, Artificial Sequence
  Description of Artificial Sequence: Synthetic peptide
  Seed: HIHIFSFTGEEMATK
HIHYFSLTLEEIATK

SEQ ID NO: 282798 - protein, 15 aa, Artificial Sequence
  Description of Artificial Sequence: Synthetic peptide
  Seed: HIHIFSFTGEEMATK
HIHYFSLTLEELATK

SEQ ID NO: 282799 - protein, 15 aa, Artificial Sequence
  Description of Artificial Sequence: Synthetic peptide
  Seed: HIHIFSFTGEEMATK
HIHYFSLTLEEMATK

SEQ ID NO: 282800 - protein, 15 aa, Artificial Sequence
  Description of Artificial Sequence: Synthetic peptide
  Seed: HIHIFSFTGEEMATK
HIHYFSLTLEENATK

SEQ ID NO: 282801 - protein, 15 aa, Artificial Sequence
  Description of Artificial Sequence: Synthetic peptide
  Seed: HIHIFSFTGEEMATK
HIHYFSLTLEESATK

SEQ ID NO: 282802 - protein, 15 aa, Artificial Sequence
  Description of Artificial Sequence: Synthetic peptide
  Seed: HIHIFSFTGEEMATK
HIHYFSLTLEETATK

SEQ ID NO: 282803 - protein, 15 aa, Artificial Sequence
  Description of Artificial Sequence: Synthetic peptide
  Seed: HIHIFSFTGEEMATK
HIHYFSLTLEEVATK

SEQ ID NO: 282804 - protein, 15 aa, Artificial Sequence
  Description of Artificial Sequence: Synthetic peptide
  Seed: HIHIFSFTGEEMATK
HIHYFSLTMEEAATK

SEQ ID NO: 282805 - protein, 15 aa, Artificial Sequence
  Description of Artificial Sequence: Synthetic peptide
  Seed: HIHIFSFTGEEMATK
HIHYFSLTMEEFATK

SEQ ID NO: 282806 - protein, 15 aa, Artificial Sequence
  Description of Artificial Sequence: Synthetic peptide
  Seed: HIHIFSFTGEEMATK
HIHYFSLTMEEGATK

SEQ ID NO: 282807 - protein, 15 aa, Artificial Sequence
  Description of Artificial Sequence: Synthetic peptide
  Seed: HIHIFSFTGEEMATK
HIHYFSLTMEEHATK

SEQ ID NO: 282808 - protein, 15 aa, Artificial Sequence
  Description of Artificial Sequence: Synthetic peptide
  Seed: HIHIFSFTGEEMATK
HIHYFSLTMEEIATK

SEQ ID NO: 282809 - protein, 15 aa, Artificial Sequence
  Description of Artificial Sequence: Synthetic peptide
  Seed: HIHIFSFTGEEMATK
HIHYFSLTMEELATK

SEQ ID NO: 282810 - protein, 15 aa, Artificial Sequence
  Description of Artificial Sequence: Synthetic peptide
  Seed: HIHIFSFTGEEMATK
HIHYFSLTMEEMATK

SEQ ID NO: 282811 - protein, 15 aa, Artificial Sequence
  Description of Artificial Sequence: Synthetic peptide
  Seed: HIHIFSFTGEEMATK
HIHYFSLTMEENATK

SEQ ID NO: 282812 - protein, 15 aa, Artificial Sequence
  Description of Artificial Sequence: Synthetic peptide
  Seed: HIHIFSFTGEEMATK
HIHYFSLTMEESATK

SEQ ID NO: 282813 - protein, 15 aa, Artificial Sequence
  Description of Artificial Sequence: Synthetic peptide
  Seed: HIHIFSFTGEEMATK
HIHYFSLTMEETATK

SEQ ID NO: 282814 - protein, 15 aa, Artificial Sequence
  Description of Artificial Sequence: Synthetic peptide
  Seed: HIHIFSFTGEEMATK
HIHYFSLTMEEVATK

SEQ ID NO: 282815 - protein, 15 aa, Artificial Sequence
  Description of Artificial Sequence: Synthetic peptide
  Seed: HIHIFSFTGEEMATK
HIHYFSLTNEEAATK

SEQ ID NO: 282816 - protein, 15 aa, Artificial Sequence
  Description of Artificial Sequence: Synthetic peptide
  Seed: HIHIFSFTGEEMATK
HIHYFSLTNEEHATK

SEQ ID NO: 282817 - protein, 15 aa, Artificial Sequence
  Description of Artificial Sequence: Synthetic peptide
  Seed: HIHIFSFTGEEMATK
HIHYFSLTNEEIATK

SEQ ID NO: 282818 - protein, 15 aa, Artificial Sequence
  Description of Artificial Sequence: Synthetic peptide
  Seed: HIHIFSFTGEEMATK
HIHYFSLTNEELATK

SEQ ID NO: 282819 - protein, 15 aa, Artificial Sequence
  Description of Artificial Sequence: Synthetic peptide
  Seed: HIHIFSFTGEEMATK
HIHYFSLTNEEMATK

SEQ ID NO: 282820 - protein, 15 aa, Artificial Sequence
  Description of Artificial Sequence: Synthetic peptide
  Seed: HIHIFSFTGEEMATK
HIHYFSLTNEENATK

SEQ ID NO: 282821 - protein, 15 aa, Artificial Sequence
  Description of Artificial Sequence: Synthetic peptide
  Seed: HIHIFSFTGEEMATK
HIHYFSLTNEESATK

SEQ ID NO: 282822 - protein, 15 aa, Artificial Sequence
  Description of Artificial Sequence: Synthetic peptide
  Seed: HIHIFSFTGEEMATK
HIHYFSLTNEETATK

SEQ ID NO: 282823 - protein, 15 aa, Artificial Sequence
  Description of Artificial Sequence: Synthetic peptide
  Seed: HIHIFSFTGEEMATK
HIHYFSLTNEEVATK

SEQ ID NO: 282824 - protein, 15 aa, Artificial Sequence
  Description of Artificial Sequence: Synthetic peptide
  Seed: HIHIFSFTGEEMATK
HIHYFSLTPEEAATK

SEQ ID NO: 282825 - protein, 15 aa, Artificial Sequence
  Description of Artificial Sequence: Synthetic peptide
  Seed: HIHIFSFTGEEMATK
HIHYFSLTPEEFATK

SEQ ID NO: 282826 - protein, 15 aa, Artificial Sequence
  Description of Artificial Sequence: Synthetic peptide
  Seed: HIHIFSFTGEEMATK
HIHYFSLTPEEGATK

SEQ ID NO: 282827 - protein, 15 aa, Artificial Sequence
  Description of Artificial Sequence: Synthetic peptide
  Seed: HIHIFSFTGEEMATK
HIHYFSLTPEEHATK

SEQ ID NO: 282828 - protein, 15 aa, Artificial Sequence
  Description of Artificial Sequence: Synthetic peptide
  Seed: HIHIFSFTGEEMATK
HIHYFSLTPEEIATK

SEQ ID NO: 282829 - protein, 15 aa, Artificial Sequence
  Description of Artificial Sequence: Synthetic peptide
  Seed: HIHIFSFTGEEMATK
HIHYFSLTPEELATK

SEQ ID NO: 282830 - protein, 15 aa, Artificial Sequence
  Description of Artificial Sequence: Synthetic peptide
  Seed: HIHIFSFTGEEMATK
HIHYFSLTPEEMATK

SEQ ID NO: 282831 - protein, 15 aa, Artificial Sequence
  Description of Artificial Sequence: Synthetic peptide
  Seed: HIHIFSFTGEEMATK
HIHYFSLTPEENATK

SEQ ID NO: 282832 - protein, 15 aa, Artificial Sequence
  Description of Artificial Sequence: Synthetic peptide
  Seed: HIHIFSFTGEEMATK
HIHYFSLTPEEPATK

SEQ ID NO: 282833 - protein, 15 aa, Artificial Sequence
  Description of Artificial Sequence: Synthetic peptide
  Seed: HIHIFSFTGEEMATK
HIHYFSLTPEEQATK

SEQ ID NO: 282834 - protein, 15 aa, Artificial Sequence
  Description of Artificial Sequence: Synthetic peptide
  Seed: HIHIFSFTGEEMATK
HIHYFSLTPEESATK

SEQ ID NO: 282835 - protein, 15 aa, Artificial Sequence
  Description of Artificial Sequence: Synthetic peptide
  Seed: HIHIFSFTGEEMATK
HIHYFSLTPEETATK

SEQ ID NO: 282836 - protein, 15 aa, Artificial Sequence
  Description of Artificial Sequence: Synthetic peptide
  Seed: HIHIFSFTGEEMATK
HIHYFSLTPEEVATK

SEQ ID NO: 282837 - protein, 15 aa, Artificial Sequence
  Description of Artificial Sequence: Synthetic peptide
  Seed: HIHIFSFTGEEMATK
HIHYFSLTPEEWATK

SEQ ID NO: 282838 - protein, 15 aa, Artificial Sequence
  Description of Artificial Sequence: Synthetic peptide
  Seed: HIHIFSFTGEEMATK
HIHYFSLTSEEAATK

SEQ ID NO: 282839 - protein, 15 aa, Artificial Sequence
  Description of Artificial Sequence: Synthetic peptide
  Seed: HIHIFSFTGEEMATK
HIHYFSLTSEECATK

SEQ ID NO: 282840 - protein, 15 aa, Artificial Sequence
  Description of Artificial Sequence: Synthetic peptide
  Seed: HIHIFSFTGEEMATK
HIHYFSLTSEEFATK

SEQ ID NO: 282841 - protein, 15 aa, Artificial Sequence
  Description of Artificial Sequence: Synthetic peptide
  Seed: HIHIFSFTGEEMATK
HIHYFSLTSEEGATK

SEQ ID NO: 282842 - protein, 15 aa, Artificial Sequence
  Description of Artificial Sequence: Synthetic peptide
  Seed: HIHIFSFTGEEMATK
HIHYFSLTSEEHATK

SEQ ID NO: 282843 - protein, 15 aa, Artificial Sequence
  Description of Artificial Sequence: Synthetic peptide
  Seed: HIHIFSFTGEEMATK
HIHYFSLTSEEIATK

SEQ ID NO: 282844 - protein, 15 aa, Artificial Sequence
  Description of Artificial Sequence: Synthetic peptide
  Seed: HIHIFSFTGEEMATK
HIHYFSLTSEELATK

SEQ ID NO: 282845 - protein, 15 aa, Artificial Sequence
  Description of Artificial Sequence: Synthetic peptide
  Seed: HIHIFSFTGEEMATK
HIHYFSLTSEEMATK

SEQ ID NO: 282846 - protein, 15 aa, Artificial Sequence
  Description of Artificial Sequence: Synthetic peptide
  Seed: HIHIFSFTGEEMATK
HIHYFSLTSEENATK

SEQ ID NO: 282847 - protein, 15 aa, Artificial Sequence
  Description of Artificial Sequence: Synthetic peptide
  Seed: HIHIFSFTGEEMATK
HIHYFSLTSEEPATK

SEQ ID NO: 282848 - protein, 15 aa, Artificial Sequence
  Description of Artificial Sequence: Synthetic peptide
  Seed: HIHIFSFTGEEMATK
HIHYFSLTSEEQATK

SEQ ID NO: 282849 - protein, 15 aa, Artificial Sequence
  Description of Artificial Sequence: Synthetic peptide
  Seed: HIHIFSFTGEEMATK
HIHYFSLTSEESATK

SEQ ID NO: 282850 - protein, 15 aa, Artificial Sequence
  Description of Artificial Sequence: Synthetic peptide
  Seed: HIHIFSFTGEEMATK
HIHYFSLTSEETATK

SEQ ID NO: 282851 - protein, 15 aa, Artificial Sequence
  Description of Artificial Sequence: Synthetic peptide
  Seed: HIHIFSFTGEEMATK
HIHYFSLTSEEVATK

SEQ ID NO: 282852 - protein, 15 aa, Artificial Sequence
  Description of Artificial Sequence: Synthetic peptide
  Seed: HIHIFSFTGEEMATK
HIHYFSLTTEEAATK

SEQ ID NO: 282853 - protein, 15 aa, Artificial Sequence
  Description of Artificial Sequence: Synthetic peptide
  Seed: HIHIFSFTGEEMATK
HIHYFSLTTEEFATK

SEQ ID NO: 282854 - protein, 15 aa, Artificial Sequence
  Description of Artificial Sequence: Synthetic peptide
  Seed: HIHIFSFTGEEMATK
HIHYFSLTTEEGATK

SEQ ID NO: 282855 - protein, 15 aa, Artificial Sequence
  Description of Artificial Sequence: Synthetic peptide
  Seed: HIHIFSFTGEEMATK
HIHYFSLTTEEHATK

SEQ ID NO: 282856 - protein, 15 aa, Artificial Sequence
  Description of Artificial Sequence: Synthetic peptide
  Seed: HIHIFSFTGEEMATK
HIHYFSLTTEEIATK

SEQ ID NO: 282857 - protein, 15 aa, Artificial Sequence
  Description of Artificial Sequence: Synthetic peptide
  Seed: HIHIFSFTGEEMATK
HIHYFSLTTEELATK

SEQ ID NO: 282858 - protein, 15 aa, Artificial Sequence
  Description of Artificial Sequence: Synthetic peptide
  Seed: HIHIFSFTGEEMATK
HIHYFSLTTEEMATK

SEQ ID NO: 282859 - protein, 15 aa, Artificial Sequence
  Description of Artificial Sequence: Synthetic peptide
  Seed: HIHIFSFTGEEMATK
HIHYFSLTTEENATK

SEQ ID NO: 282860 - protein, 15 aa, Artificial Sequence
  Description of Artificial Sequence: Synthetic peptide
  Seed: HIHIFSFTGEEMATK
HIHYFSLTTEEPATK

SEQ ID NO: 282861 - protein, 15 aa, Artificial Sequence
  Description of Artificial Sequence: Synthetic peptide
  Seed: HIHIFSFTGEEMATK
HIHYFSLTTEEQATK

SEQ ID NO: 282862 - protein, 15 aa, Artificial Sequence
  Description of Artificial Sequence: Synthetic peptide
  Seed: HIHIFSFTGEEMATK
HIHYFSLTTEESATK

SEQ ID NO: 282863 - protein, 15 aa, Artificial Sequence
  Description of Artificial Sequence: Synthetic peptide
  Seed: HIHIFSFTGEEMATK
HIHYFSLTTEETATK

SEQ ID NO: 282864 - protein, 15 aa, Artificial Sequence
  Description of Artificial Sequence: Synthetic peptide
  Seed: HIHIFSFTGEEMATK
HIHYFSLTTEEVATK

SEQ ID NO: 282865 - protein, 15 aa, Artificial Sequence
  Description of Artificial Sequence: Synthetic peptide
  Seed: HIHIFSFTGEEMATK
HIHYFSLTTEEYATK

SEQ ID NO: 282866 - protein, 15 aa, Artificial Sequence
  Description of Artificial Sequence: Synthetic peptide
  Seed: HIHIFSFTGEEMATK
HIHYFSLTVEEAATK

SEQ ID NO: 282867 - protein, 15 aa, Artificial Sequence
  Description of Artificial Sequence: Synthetic peptide
  Seed: HIHIFSFTGEEMATK
HIHYFSLTVEEEATK

SEQ ID NO: 282868 - protein, 15 aa, Artificial Sequence
  Description of Artificial Sequence: Synthetic peptide
  Seed: HIHIFSFTGEEMATK
HIHYFSLTVEEFATK

SEQ ID NO: 282869 - protein, 15 aa, Artificial Sequence
  Description of Artificial Sequence: Synthetic peptide
  Seed: HIHIFSFTGEEMATK
HIHYFSLTVEEGATK

SEQ ID NO: 282870 - protein, 15 aa, Artificial Sequence
  Description of Artificial Sequence: Synthetic peptide
  Seed: HIHIFSFTGEEMATK
HIHYFSLTVEEHATK

SEQ ID NO: 282871 - protein, 15 aa, Artificial Sequence
  Description of Artificial Sequence: Synthetic peptide
  Seed: HIHIFSFTGEEMATK
HIHYFSLTVEEIATK

SEQ ID NO: 282872 - protein, 15 aa, Artificial Sequence
  Description of Artificial Sequence: Synthetic peptide
  Seed: HIHIFSFTGEEMATK
HIHYFSLTVEEKATK

SEQ ID NO: 282873 - protein, 15 aa, Artificial Sequence
  Description of Artificial Sequence: Synthetic peptide
  Seed: HIHIFSFTGEEMATK
HIHYFSLTVEELATK

SEQ ID NO: 282874 - protein, 15 aa, Artificial Sequence
  Description of Artificial Sequence: Synthetic peptide
  Seed: HIHIFSFTGEEMATK
HIHYFSLTVEEMATK

SEQ ID NO: 282875 - protein, 15 aa, Artificial Sequence
  Description of Artificial Sequence: Synthetic peptide
  Seed: HIHIFSFTGEEMATK
HIHYFSLTVEENATK

SEQ ID NO: 282876 - protein, 15 aa, Artificial Sequence
  Description of Artificial Sequence: Synthetic peptide
  Seed: HIHIFSFTGEEMATK
HIHYFSLTVEEPATK

SEQ ID NO: 282877 - protein, 15 aa, Artificial Sequence
  Description of Artificial Sequence: Synthetic peptide
  Seed: HIHIFSFTGEEMATK
HIHYFSLTVEEQATK

SEQ ID NO: 282878 - protein, 15 aa, Artificial Sequence
  Description of Artificial Sequence: Synthetic peptide
  Seed: HIHIFSFTGEEMATK
HIHYFSLTVEERATK

SEQ ID NO: 282879 - protein, 15 aa, Artificial Sequence
  Description of Artificial Sequence: Synthetic peptide
  Seed: HIHIFSFTGEEMATK
HIHYFSLTVEESATK

SEQ ID NO: 282880 - protein, 15 aa, Artificial Sequence
  Description of Artificial Sequence: Synthetic peptide
  Seed: HIHIFSFTGEEMATK
HIHYFSLTVEETATK

SEQ ID NO: 282881 - protein, 15 aa, Artificial Sequence
  Description of Artificial Sequence: Synthetic peptide
  Seed: HIHIFSFTGEEMATK
HIHYFSLTVEEVATK

SEQ ID NO: 282882 - protein, 15 aa, Artificial Sequence
  Description of Artificial Sequence: Synthetic peptide
  Seed: HIHIFSFTGEEMATK
HIHYFSLTVEEYATK

SEQ ID NO: 282883 - protein, 15 aa, Artificial Sequence
  Description of Artificial Sequence: Synthetic peptide
  Seed: HIHIFSFTGEEMATK
HIHYFSLTWEEFATK

SEQ ID NO: 282884 - protein, 15 aa, Artificial Sequence
  Description of Artificial Sequence: Synthetic peptide
  Seed: HIHIFSFTGEEMATK
HIHYFSLTWEEIATK

SEQ ID NO: 282885 - protein, 15 aa, Artificial Sequence
  Description of Artificial Sequence: Synthetic peptide
  Seed: HIHIFSFTGEEMATK
HIHYFSLTWEELATK

SEQ ID NO: 282886 - protein, 15 aa, Artificial Sequence
  Description of Artificial Sequence: Synthetic peptide
  Seed: HIHIFSFTGEEMATK
HIHYFSLTWEEMATK

SEQ ID NO: 282887 - protein, 15 aa, Artificial Sequence
  Description of Artificial Sequence: Synthetic peptide
  Seed: HIHIFSFTGEEMATK
HIHYFSLTWEEVATK

SEQ ID NO: 282888 - protein, 15 aa, Artificial Sequence
  Description of Artificial Sequence: Synthetic peptide
  Seed: HIHIFSFTGEEMATK
HIHYFSLTYEEFATK

SEQ ID NO: 282889 - protein, 15 aa, Artificial Sequence
  Description of Artificial Sequence: Synthetic peptide
  Seed: HIHIFSFTGEEMATK
HIHYFSLTYEEIATK

SEQ ID NO: 282890 - protein, 15 aa, Artificial Sequence
  Description of Artificial Sequence: Synthetic peptide
  Seed: HIHIFSFTGEEMATK
HIHYFSLTYEELATK

SEQ ID NO: 282891 - protein, 15 aa, Artificial Sequence
  Description of Artificial Sequence: Synthetic peptide
  Seed: HIHIFSFTGEEMATK
HIHYFSLTYEEMATK

SEQ ID NO: 282892 - protein, 15 aa, Artificial Sequence
  Description of Artificial Sequence: Synthetic peptide
  Seed: HIHIFSFTGEEMATK
HIHYFSLTYEEVATK

SEQ ID NO: 282893 - protein, 15 aa, Artificial Sequence
  Description of Artificial Sequence: Synthetic peptide
  Seed: HIHIFSFTGEEMATK
HIHYFSLTYEEYATK

SEQ ID NO: 282894 - protein, 15 aa, Artificial Sequence
  Description of Artificial Sequence: Synthetic peptide
  Seed: HIHIFSFTGEEMATK
HIHYFSMTAEEAATK

SEQ ID NO: 282895 - protein, 15 aa, Artificial Sequence
  Description of Artificial Sequence: Synthetic peptide
  Seed: HIHIFSFTGEEMATK
HIHYFSMTAEEEATK

SEQ ID NO: 282896 - protein, 15 aa, Artificial Sequence
  Description of Artificial Sequence: Synthetic peptide
  Seed: HIHIFSFTGEEMATK
HIHYFSMTAEEFATK

SEQ ID NO: 282897 - protein, 15 aa, Artificial Sequence
  Description of Artificial Sequence: Synthetic peptide
  Seed: HIHIFSFTGEEMATK
HIHYFSMTAEEGATK

SEQ ID NO: 282898 - protein, 15 aa, Artificial Sequence
  Description of Artificial Sequence: Synthetic peptide
  Seed: HIHIFSFTGEEMATK
HIHYFSMTAEEHATK

SEQ ID NO: 282899 - protein, 15 aa, Artificial Sequence
  Description of Artificial Sequence: Synthetic peptide
  Seed: HIHIFSFTGEEMATK
HIHYFSMTAEEIATK

SEQ ID NO: 282900 - protein, 15 aa, Artificial Sequence
  Description of Artificial Sequence: Synthetic peptide
  Seed: HIHIFSFTGEEMATK
HIHYFSMTAEEKATK

SEQ ID NO: 282901 - protein, 15 aa, Artificial Sequence
  Description of Artificial Sequence: Synthetic peptide
  Seed: HIHIFSFTGEEMATK
HIHYFSMTAEELATK

SEQ ID NO: 282902 - protein, 15 aa, Artificial Sequence
  Description of Artificial Sequence: Synthetic peptide
  Seed: HIHIFSFTGEEMATK
HIHYFSMTAEEMATK

SEQ ID NO: 282903 - protein, 15 aa, Artificial Sequence
  Description of Artificial Sequence: Synthetic peptide
  Seed: HIHIFSFTGEEMATK
HIHYFSMTAEENATK

SEQ ID NO: 282904 - protein, 15 aa, Artificial Sequence
  Description of Artificial Sequence: Synthetic peptide
  Seed: HIHIFSFTGEEMATK
HIHYFSMTAEEPATK

SEQ ID NO: 282905 - protein, 15 aa, Artificial Sequence
  Description of Artificial Sequence: Synthetic peptide
  Seed: HIHIFSFTGEEMATK
HIHYFSMTAEEQATK

SEQ ID NO: 282906 - protein, 15 aa, Artificial Sequence
  Description of Artificial Sequence: Synthetic peptide
  Seed: HIHIFSFTGEEMATK
HIHYFSMTAEERATK

SEQ ID NO: 282907 - protein, 15 aa, Artificial Sequence
  Description of Artificial Sequence: Synthetic peptide
  Seed: HIHIFSFTGEEMATK
HIHYFSMTAEESATK

SEQ ID NO: 282908 - protein, 15 aa, Artificial Sequence
  Description of Artificial Sequence: Synthetic peptide
  Seed: HIHIFSFTGEEMATK
HIHYFSMTAEETATK

SEQ ID NO: 282909 - protein, 15 aa, Artificial Sequence
  Description of Artificial Sequence: Synthetic peptide
  Seed: HIHIFSFTGEEMATK
HIHYFSMTAEEVATK

SEQ ID NO: 282910 - protein, 15 aa, Artificial Sequence
  Description of Artificial Sequence: Synthetic peptide
  Seed: HIHIFSFTGEEMATK
HIHYFSMTAEEWATK

SEQ ID NO: 282911 - protein, 15 aa, Artificial Sequence
  Description of Artificial Sequence: Synthetic peptide
  Seed: HIHIFSFTGEEMATK
HIHYFSMTAEEYATK

SEQ ID NO: 282912 - protein, 15 aa, Artificial Sequence
  Description of Artificial Sequence: Synthetic peptide
  Seed: HIHIFSFTGEEMATK
HIHYFSMTFEEAATK

SEQ ID NO: 282913 - protein, 15 aa, Artificial Sequence
  Description of Artificial Sequence: Synthetic peptide
  Seed: HIHIFSFTGEEMATK
HIHYFSMTFEEEATK

SEQ ID NO: 282914 - protein, 15 aa, Artificial Sequence
  Description of Artificial Sequence: Synthetic peptide
  Seed: HIHIFSFTGEEMATK
HIHYFSMTFEEFATK

SEQ ID NO: 282915 - protein, 15 aa, Artificial Sequence
  Description of Artificial Sequence: Synthetic peptide
  Seed: HIHIFSFTGEEMATK
HIHYFSMTFEEHATK

SEQ ID NO: 282916 - protein, 15 aa, Artificial Sequence
  Description of Artificial Sequence: Synthetic peptide
  Seed: HIHIFSFTGEEMATK
HIHYFSMTFEEIATK

SEQ ID NO: 282917 - protein, 15 aa, Artificial Sequence
  Description of Artificial Sequence: Synthetic peptide
  Seed: HIHIFSFTGEEMATK
HIHYFSMTFEELATK

SEQ ID NO: 282918 - protein, 15 aa, Artificial Sequence
  Description of Artificial Sequence: Synthetic peptide
  Seed: HIHIFSFTGEEMATK
HIHYFSMTFEEMATK

SEQ ID NO: 282919 - protein, 15 aa, Artificial Sequence
  Description of Artificial Sequence: Synthetic peptide
  Seed: HIHIFSFTGEEMATK
HIHYFSMTFEENATK

SEQ ID NO: 282920 - protein, 15 aa, Artificial Sequence
  Description of Artificial Sequence: Synthetic peptide
  Seed: HIHIFSFTGEEMATK
HIHYFSMTFEERATK

SEQ ID NO: 282921 - protein, 15 aa, Artificial Sequence
  Description of Artificial Sequence: Synthetic peptide
  Seed: HIHIFSFTGEEMATK
HIHYFSMTFEESATK

SEQ ID NO: 282922 - protein, 15 aa, Artificial Sequence
  Description of Artificial Sequence: Synthetic peptide
  Seed: HIHIFSFTGEEMATK
HIHYFSMTFEETATK

SEQ ID NO: 282923 - protein, 15 aa, Artificial Sequence
  Description of Artificial Sequence: Synthetic peptide
  Seed: HIHIFSFTGEEMATK
HIHYFSMTFEEVATK

SEQ ID NO: 282924 - protein, 15 aa, Artificial Sequence
  Description of Artificial Sequence: Synthetic peptide
  Seed: HIHIFSFTGEEMATK
HIHYFSMTFEEYATK

SEQ ID NO: 282925 - protein, 15 aa, Artificial Sequence
  Description of Artificial Sequence: Synthetic peptide
  Seed: HIHIFSFTGEEMATK
HIHYFSMTGEEAATK

SEQ ID NO: 282926 - protein, 15 aa, Artificial Sequence
  Description of Artificial Sequence: Synthetic peptide
  Seed: HIHIFSFTGEEMATK
HIHYFSMTGEEFATK

SEQ ID NO: 282927 - protein, 15 aa, Artificial Sequence
  Description of Artificial Sequence: Synthetic peptide
  Seed: HIHIFSFTGEEMATK
HIHYFSMTGEEGATK

SEQ ID NO: 282928 - protein, 15 aa, Artificial Sequence
  Description of Artificial Sequence: Synthetic peptide
  Seed: HIHIFSFTGEEMATK
HIHYFSMTGEEHATK

SEQ ID NO: 282929 - protein, 15 aa, Artificial Sequence
  Description of Artificial Sequence: Synthetic peptide
  Seed: HIHIFSFTGEEMATK
HIHYFSMTGEEIATK

SEQ ID NO: 282930 - protein, 15 aa, Artificial Sequence
  Description of Artificial Sequence: Synthetic peptide
  Seed: HIHIFSFTGEEMATK
HIHYFSMTGEELATK

SEQ ID NO: 282931 - protein, 15 aa, Artificial Sequence
  Description of Artificial Sequence: Synthetic peptide
  Seed: HIHIFSFTGEEMATK
HIHYFSMTGEEMATK

SEQ ID NO: 282932 - protein, 15 aa, Artificial Sequence
  Description of Artificial Sequence: Synthetic peptide
  Seed: HIHIFSFTGEEMATK
HIHYFSMTGEENATK

SEQ ID NO: 282933 - protein, 15 aa, Artificial Sequence
  Description of Artificial Sequence: Synthetic peptide
  Seed: HIHIFSFTGEEMATK
HIHYFSMTGEESATK

SEQ ID NO: 282934 - protein, 15 aa, Artificial Sequence
  Description of Artificial Sequence: Synthetic peptide
  Seed: HIHIFSFTGEEMATK
HIHYFSMTGEETATK

SEQ ID NO: 282935 - protein, 15 aa, Artificial Sequence
  Description of Artificial Sequence: Synthetic peptide
  Seed: HIHIFSFTGEEMATK
HIHYFSMTGEEVATK

SEQ ID NO: 282936 - protein, 15 aa, Artificial Sequence
  Description of Artificial Sequence: Synthetic peptide
  Seed: HIHIFSFTGEEMATK
HIHYFSMTHEELATK

SEQ ID NO: 282937 - protein, 15 aa, Artificial Sequence
  Description of Artificial Sequence: Synthetic peptide
  Seed: HIHIFSFTGEEMATK
HIHYFSMTIEEAATK

SEQ ID NO: 282938 - protein, 15 aa, Artificial Sequence
  Description of Artificial Sequence: Synthetic peptide
  Seed: HIHIFSFTGEEMATK
HIHYFSMTIEEEATK

SEQ ID NO: 282939 - protein, 15 aa, Artificial Sequence
  Description of Artificial Sequence: Synthetic peptide
  Seed: HIHIFSFTGEEMATK
HIHYFSMTIEEGATK

SEQ ID NO: 282940 - protein, 15 aa, Artificial Sequence
  Description of Artificial Sequence: Synthetic peptide
  Seed: HIHIFSFTGEEMATK
HIHYFSMTIEEHATK

SEQ ID NO: 282941 - protein, 15 aa, Artificial Sequence
  Description of Artificial Sequence: Synthetic peptide
  Seed: HIHIFSFTGEEMATK
HIHYFSMTIEEIATK

SEQ ID NO: 282942 - protein, 15 aa, Artificial Sequence
  Description of Artificial Sequence: Synthetic peptide
  Seed: HIHIFSFTGEEMATK
HIHYFSMTIEEKATK

SEQ ID NO: 282943 - protein, 15 aa, Artificial Sequence
  Description of Artificial Sequence: Synthetic peptide
  Seed: HIHIFSFTGEEMATK
HIHYFSMTIEELATK

SEQ ID NO: 282944 - protein, 15 aa, Artificial Sequence
  Description of Artificial Sequence: Synthetic peptide
  Seed: HIHIFSFTGEEMATK
HIHYFSMTIEEMATK

SEQ ID NO: 282945 - protein, 15 aa, Artificial Sequence
  Description of Artificial Sequence: Synthetic peptide
  Seed: HIHIFSFTGEEMATK
HIHYFSMTIEENATK

SEQ ID NO: 282946 - protein, 15 aa, Artificial Sequence
  Description of Artificial Sequence: Synthetic peptide
  Seed: HIHIFSFTGEEMATK
HIHYFSMTIEEPATK

SEQ ID NO: 282947 - protein, 15 aa, Artificial Sequence
  Description of Artificial Sequence: Synthetic peptide
  Seed: HIHIFSFTGEEMATK
HIHYFSMTIEEQATK

SEQ ID NO: 282948 - protein, 15 aa, Artificial Sequence
  Description of Artificial Sequence: Synthetic peptide
  Seed: HIHIFSFTGEEMATK
HIHYFSMTIEERATK

SEQ ID NO: 282949 - protein, 15 aa, Artificial Sequence
  Description of Artificial Sequence: Synthetic peptide
  Seed: HIHIFSFTGEEMATK
HIHYFSMTIEESATK

SEQ ID NO: 282950 - protein, 15 aa, Artificial Sequence
  Description of Artificial Sequence: Synthetic peptide
  Seed: HIHIFSFTGEEMATK
HIHYFSMTIEETATK

SEQ ID NO: 282951 - protein, 15 aa, Artificial Sequence
  Description of Artificial Sequence: Synthetic peptide
  Seed: HIHIFSFTGEEMATK
HIHYFSMTIEEVATK

SEQ ID NO: 282952 - protein, 15 aa, Artificial Sequence
  Description of Artificial Sequence: Synthetic peptide
  Seed: HIHIFSFTGEEMATK
HIHYFSMTIEEYATK

SEQ ID NO: 282953 - protein, 15 aa, Artificial Sequence
  Description of Artificial Sequence: Synthetic peptide
  Seed: HIHIFSFTGEEMATK
HIHYFSMTLEEAATK

SEQ ID NO: 282954 - protein, 15 aa, Artificial Sequence
  Description of Artificial Sequence: Synthetic peptide
  Seed: HIHIFSFTGEEMATK
HIHYFSMTLEEFATK

SEQ ID NO: 282955 - protein, 15 aa, Artificial Sequence
  Description of Artificial Sequence: Synthetic peptide
  Seed: HIHIFSFTGEEMATK
HIHYFSMTLEEGATK

SEQ ID NO: 282956 - protein, 15 aa, Artificial Sequence
  Description of Artificial Sequence: Synthetic peptide
  Seed: HIHIFSFTGEEMATK
HIHYFSMTLEEHATK

SEQ ID NO: 282957 - protein, 15 aa, Artificial Sequence
  Description of Artificial Sequence: Synthetic peptide
  Seed: HIHIFSFTGEEMATK
HIHYFSMTLEEIATK

SEQ ID NO: 282958 - protein, 15 aa, Artificial Sequence
  Description of Artificial Sequence: Synthetic peptide
  Seed: HIHIFSFTGEEMATK
HIHYFSMTLEELATK

SEQ ID NO: 282959 - protein, 15 aa, Artificial Sequence
  Description of Artificial Sequence: Synthetic peptide
  Seed: HIHIFSFTGEEMATK
HIHYFSMTLEEMATK

SEQ ID NO: 282960 - protein, 15 aa, Artificial Sequence
  Description of Artificial Sequence: Synthetic peptide
  Seed: HIHIFSFTGEEMATK
HIHYFSMTLEENATK

SEQ ID NO: 282961 - protein, 15 aa, Artificial Sequence
  Description of Artificial Sequence: Synthetic peptide
  Seed: HIHIFSFTGEEMATK
HIHYFSMTLEEPATK

SEQ ID NO: 282962 - protein, 15 aa, Artificial Sequence
  Description of Artificial Sequence: Synthetic peptide
  Seed: HIHIFSFTGEEMATK
HIHYFSMTLEEQATK

SEQ ID NO: 282963 - protein, 15 aa, Artificial Sequence
  Description of Artificial Sequence: Synthetic peptide
  Seed: HIHIFSFTGEEMATK
HIHYFSMTLEESATK

SEQ ID NO: 282964 - protein, 15 aa, Artificial Sequence
  Description of Artificial Sequence: Synthetic peptide
  Seed: HIHIFSFTGEEMATK
HIHYFSMTLEETATK

SEQ ID NO: 282965 - protein, 15 aa, Artificial Sequence
  Description of Artificial Sequence: Synthetic peptide
  Seed: HIHIFSFTGEEMATK
HIHYFSMTLEEVATK

SEQ ID NO: 282966 - protein, 15 aa, Artificial Sequence
  Description of Artificial Sequence: Synthetic peptide
  Seed: HIHIFSFTGEEMATK
HIHYFSMTMEEAATK

SEQ ID NO: 282967 - protein, 15 aa, Artificial Sequence
  Description of Artificial Sequence: Synthetic peptide
  Seed: HIHIFSFTGEEMATK
HIHYFSMTMEEHATK

SEQ ID NO: 282968 - protein, 15 aa, Artificial Sequence
  Description of Artificial Sequence: Synthetic peptide
  Seed: HIHIFSFTGEEMATK
HIHYFSMTMEEIATK

SEQ ID NO: 282969 - protein, 15 aa, Artificial Sequence
  Description of Artificial Sequence: Synthetic peptide
  Seed: HIHIFSFTGEEMATK
HIHYFSMTMEELATK

SEQ ID NO: 282970 - protein, 15 aa, Artificial Sequence
  Description of Artificial Sequence: Synthetic peptide
  Seed: HIHIFSFTGEEMATK
HIHYFSMTMEEMATK

SEQ ID NO: 282971 - protein, 15 aa, Artificial Sequence
  Description of Artificial Sequence: Synthetic peptide
  Seed: HIHIFSFTGEEMATK
HIHYFSMTMEENATK

SEQ ID NO: 282972 - protein, 15 aa, Artificial Sequence
  Description of Artificial Sequence: Synthetic peptide
  Seed: HIHIFSFTGEEMATK
HIHYFSMTMEEPATK

SEQ ID NO: 282973 - protein, 15 aa, Artificial Sequence
  Description of Artificial Sequence: Synthetic peptide
  Seed: HIHIFSFTGEEMATK
HIHYFSMTMEEQATK

SEQ ID NO: 282974 - protein, 15 aa, Artificial Sequence
  Description of Artificial Sequence: Synthetic peptide
  Seed: HIHIFSFTGEEMATK
HIHYFSMTMEESATK

SEQ ID NO: 282975 - protein, 15 aa, Artificial Sequence
  Description of Artificial Sequence: Synthetic peptide
  Seed: HIHIFSFTGEEMATK
HIHYFSMTMEETATK

SEQ ID NO: 282976 - protein, 15 aa, Artificial Sequence
  Description of Artificial Sequence: Synthetic peptide
  Seed: HIHIFSFTGEEMATK
HIHYFSMTMEEVATK

SEQ ID NO: 282977 - protein, 15 aa, Artificial Sequence
  Description of Artificial Sequence: Synthetic peptide
  Seed: HIHIFSFTGEEMATK
HIHYFSMTNEEAATK

SEQ ID NO: 282978 - protein, 15 aa, Artificial Sequence
  Description of Artificial Sequence: Synthetic peptide
  Seed: HIHIFSFTGEEMATK
HIHYFSMTNEEIATK

SEQ ID NO: 282979 - protein, 15 aa, Artificial Sequence
  Description of Artificial Sequence: Synthetic peptide
  Seed: HIHIFSFTGEEMATK
HIHYFSMTNEELATK

SEQ ID NO: 282980 - protein, 15 aa, Artificial Sequence
  Description of Artificial Sequence: Synthetic peptide
  Seed: HIHIFSFTGEEMATK
HIHYFSMTNEEMATK

SEQ ID NO: 282981 - protein, 15 aa, Artificial Sequence
  Description of Artificial Sequence: Synthetic peptide
  Seed: HIHIFSFTGEEMATK
HIHYFSMTNEENATK

SEQ ID NO: 282982 - protein, 15 aa, Artificial Sequence
  Description of Artificial Sequence: Synthetic peptide
  Seed: HIHIFSFTGEEMATK
HIHYFSMTNEESATK

SEQ ID NO: 282983 - protein, 15 aa, Artificial Sequence
  Description of Artificial Sequence: Synthetic peptide
  Seed: HIHIFSFTGEEMATK
HIHYFSMTNEETATK

SEQ ID NO: 282984 - protein, 15 aa, Artificial Sequence
  Description of Artificial Sequence: Synthetic peptide
  Seed: HIHIFSFTGEEMATK
HIHYFSMTNEEVATK

SEQ ID NO: 282985 - protein, 15 aa, Artificial Sequence
  Description of Artificial Sequence: Synthetic peptide
  Seed: HIHIFSFTGEEMATK
HIHYFSMTPEEAATK

SEQ ID NO: 282986 - protein, 15 aa, Artificial Sequence
  Description of Artificial Sequence: Synthetic peptide
  Seed: HIHIFSFTGEEMATK
HIHYFSMTPEEFATK

SEQ ID NO: 282987 - protein, 15 aa, Artificial Sequence
  Description of Artificial Sequence: Synthetic peptide
  Seed: HIHIFSFTGEEMATK
HIHYFSMTPEEGATK

SEQ ID NO: 282988 - protein, 15 aa, Artificial Sequence
  Description of Artificial Sequence: Synthetic peptide
  Seed: HIHIFSFTGEEMATK
HIHYFSMTPEEHATK

SEQ ID NO: 282989 - protein, 15 aa, Artificial Sequence
  Description of Artificial Sequence: Synthetic peptide
  Seed: HIHIFSFTGEEMATK
HIHYFSMTPEEIATK

SEQ ID NO: 282990 - protein, 15 aa, Artificial Sequence
  Description of Artificial Sequence: Synthetic peptide
  Seed: HIHIFSFTGEEMATK
HIHYFSMTPEELATK

SEQ ID NO: 282991 - protein, 15 aa, Artificial Sequence
  Description of Artificial Sequence: Synthetic peptide
  Seed: HIHIFSFTGEEMATK
HIHYFSMTPEEMATK

SEQ ID NO: 282992 - protein, 15 aa, Artificial Sequence
  Description of Artificial Sequence: Synthetic peptide
  Seed: HIHIFSFTGEEMATK
HIHYFSMTPEENATK

SEQ ID NO: 282993 - protein, 15 aa, Artificial Sequence
  Description of Artificial Sequence: Synthetic peptide
  Seed: HIHIFSFTGEEMATK
HIHYFSMTPEEPATK

SEQ ID NO: 282994 - protein, 15 aa, Artificial Sequence
  Description of Artificial Sequence: Synthetic peptide
  Seed: HIHIFSFTGEEMATK
HIHYFSMTPEEQATK

SEQ ID NO: 282995 - protein, 15 aa, Artificial Sequence
  Description of Artificial Sequence: Synthetic peptide
  Seed: HIHIFSFTGEEMATK
HIHYFSMTPEESATK

SEQ ID NO: 282996 - protein, 15 aa, Artificial Sequence
  Description of Artificial Sequence: Synthetic peptide
  Seed: HIHIFSFTGEEMATK
HIHYFSMTPEETATK

SEQ ID NO: 282997 - protein, 15 aa, Artificial Sequence
  Description of Artificial Sequence: Synthetic peptide
  Seed: HIHIFSFTGEEMATK
HIHYFSMTPEEVATK

SEQ ID NO: 282998 - protein, 15 aa, Artificial Sequence
  Description of Artificial Sequence: Synthetic peptide
  Seed: HIHIFSFTGEEMATK
HIHYFSMTPEEWATK

SEQ ID NO: 282999 - protein, 15 aa, Artificial Sequence
  Description of Artificial Sequence: Synthetic peptide
  Seed: HIHIFSFTGEEMATK
HIHYFSMTSEEAATK

SEQ ID NO: 283000 - protein, 15 aa, Artificial Sequence
  Description of Artificial Sequence: Synthetic peptide
  Seed: HIHIFSFTGEEMATK
HIHYFSMTSEEFATK

SEQ ID NO: 283001 - protein, 15 aa, Artificial Sequence
  Description of Artificial Sequence: Synthetic peptide
  Seed: HIHIFSFTGEEMATK
HIHYFSMTSEEGATK

SEQ ID NO: 283002 - protein, 15 aa, Artificial Sequence
  Description of Artificial Sequence: Synthetic peptide
  Seed: HIHIFSFTGEEMATK
HIHYFSMTSEEHATK

SEQ ID NO: 283003 - protein, 15 aa, Artificial Sequence
  Description of Artificial Sequence: Synthetic peptide
  Seed: HIHIFSFTGEEMATK
HIHYFSMTSEEIATK

SEQ ID NO: 283004 - protein, 15 aa, Artificial Sequence
  Description of Artificial Sequence: Synthetic peptide
  Seed: HIHIFSFTGEEMATK
HIHYFSMTSEELATK

SEQ ID NO: 283005 - protein, 15 aa, Artificial Sequence
  Description of Artificial Sequence: Synthetic peptide
  Seed: HIHIFSFTGEEMATK
HIHYFSMTSEEMATK

SEQ ID NO: 283006 - protein, 15 aa, Artificial Sequence
  Description of Artificial Sequence: Synthetic peptide
  Seed: HIHIFSFTGEEMATK
HIHYFSMTSEENATK

SEQ ID NO: 283007 - protein, 15 aa, Artificial Sequence
  Description of Artificial Sequence: Synthetic peptide
  Seed: HIHIFSFTGEEMATK
HIHYFSMTSEEPATK

SEQ ID NO: 283008 - protein, 15 aa, Artificial Sequence
  Description of Artificial Sequence: Synthetic peptide
  Seed: HIHIFSFTGEEMATK
HIHYFSMTSEEQATK

SEQ ID NO: 283009 - protein, 15 aa, Artificial Sequence
  Description of Artificial Sequence: Synthetic peptide
  Seed: HIHIFSFTGEEMATK
HIHYFSMTSEESATK

SEQ ID NO: 283010 - protein, 15 aa, Artificial Sequence
  Description of Artificial Sequence: Synthetic peptide
  Seed: HIHIFSFTGEEMATK
HIHYFSMTSEETATK

SEQ ID NO: 283011 - protein, 15 aa, Artificial Sequence
  Description of Artificial Sequence: Synthetic peptide
  Seed: HIHIFSFTGEEMATK
HIHYFSMTSEEVATK

SEQ ID NO: 283012 - protein, 15 aa, Artificial Sequence
  Description of Artificial Sequence: Synthetic peptide
  Seed: HIHIFSFTGEEMATK
HIHYFSMTSEEYATK

SEQ ID NO: 283013 - protein, 15 aa, Artificial Sequence
  Description of Artificial Sequence: Synthetic peptide
  Seed: HIHIFSFTGEEMATK
HIHYFSMTTEEAATK

SEQ ID NO: 283014 - protein, 15 aa, Artificial Sequence
  Description of Artificial Sequence: Synthetic peptide
  Seed: HIHIFSFTGEEMATK
HIHYFSMTTEEFATK

SEQ ID NO: 283015 - protein, 15 aa, Artificial Sequence
  Description of Artificial Sequence: Synthetic peptide
  Seed: HIHIFSFTGEEMATK
HIHYFSMTTEEGATK

SEQ ID NO: 283016 - protein, 15 aa, Artificial Sequence
  Description of Artificial Sequence: Synthetic peptide
  Seed: HIHIFSFTGEEMATK
HIHYFSMTTEEHATK

SEQ ID NO: 283017 - protein, 15 aa, Artificial Sequence
  Description of Artificial Sequence: Synthetic peptide
  Seed: HIHIFSFTGEEMATK
HIHYFSMTTEEIATK

SEQ ID NO: 283018 - protein, 15 aa, Artificial Sequence
  Description of Artificial Sequence: Synthetic peptide
  Seed: HIHIFSFTGEEMATK
HIHYFSMTTEELATK

SEQ ID NO: 283019 - protein, 15 aa, Artificial Sequence
  Description of Artificial Sequence: Synthetic peptide
  Seed: HIHIFSFTGEEMATK
HIHYFSMTTEEMATK

SEQ ID NO: 283020 - protein, 15 aa, Artificial Sequence
  Description of Artificial Sequence: Synthetic peptide
  Seed: HIHIFSFTGEEMATK
HIHYFSMTTEENATK

SEQ ID NO: 283021 - protein, 15 aa, Artificial Sequence
  Description of Artificial Sequence: Synthetic peptide
  Seed: HIHIFSFTGEEMATK
HIHYFSMTTEEPATK

SEQ ID NO: 283022 - protein, 15 aa, Artificial Sequence
  Description of Artificial Sequence: Synthetic peptide
  Seed: HIHIFSFTGEEMATK
HIHYFSMTTEEQATK

SEQ ID NO: 283023 - protein, 15 aa, Artificial Sequence
  Description of Artificial Sequence: Synthetic peptide
  Seed: HIHIFSFTGEEMATK
HIHYFSMTTEESATK

SEQ ID NO: 283024 - protein, 15 aa, Artificial Sequence
  Description of Artificial Sequence: Synthetic peptide
  Seed: HIHIFSFTGEEMATK
HIHYFSMTTEETATK

SEQ ID NO: 283025 - protein, 15 aa, Artificial Sequence
  Description of Artificial Sequence: Synthetic peptide
  Seed: HIHIFSFTGEEMATK
HIHYFSMTTEEVATK

SEQ ID NO: 283026 - protein, 15 aa, Artificial Sequence
  Description of Artificial Sequence: Synthetic peptide
  Seed: HIHIFSFTGEEMATK
HIHYFSMTTEEYATK

SEQ ID NO: 283027 - protein, 15 aa, Artificial Sequence
  Description of Artificial Sequence: Synthetic peptide
  Seed: HIHIFSFTGEEMATK
HIHYFSMTVEEAATK

SEQ ID NO: 283028 - protein, 15 aa, Artificial Sequence
  Description of Artificial Sequence: Synthetic peptide
  Seed: HIHIFSFTGEEMATK
HIHYFSMTVEEEATK

SEQ ID NO: 283029 - protein, 15 aa, Artificial Sequence
  Description of Artificial Sequence: Synthetic peptide
  Seed: HIHIFSFTGEEMATK
HIHYFSMTVEEFATK

SEQ ID NO: 283030 - protein, 15 aa, Artificial Sequence
  Description of Artificial Sequence: Synthetic peptide
  Seed: HIHIFSFTGEEMATK
HIHYFSMTVEEGATK

SEQ ID NO: 283031 - protein, 15 aa, Artificial Sequence
  Description of Artificial Sequence: Synthetic peptide
  Seed: HIHIFSFTGEEMATK
HIHYFSMTVEEHATK

SEQ ID NO: 283032 - protein, 15 aa, Artificial Sequence
  Description of Artificial Sequence: Synthetic peptide
  Seed: HIHIFSFTGEEMATK
HIHYFSMTVEEIATK

SEQ ID NO: 283033 - protein, 15 aa, Artificial Sequence
  Description of Artificial Sequence: Synthetic peptide
  Seed: HIHIFSFTGEEMATK
HIHYFSMTVEEKATK

SEQ ID NO: 283034 - protein, 15 aa, Artificial Sequence
  Description of Artificial Sequence: Synthetic peptide
  Seed: HIHIFSFTGEEMATK
HIHYFSMTVEELATK

SEQ ID NO: 283035 - protein, 15 aa, Artificial Sequence
  Description of Artificial Sequence: Synthetic peptide
  Seed: HIHIFSFTGEEMATK
HIHYFSMTVEEMATK

SEQ ID NO: 283036 - protein, 15 aa, Artificial Sequence
  Description of Artificial Sequence: Synthetic peptide
  Seed: HIHIFSFTGEEMATK
HIHYFSMTVEENATK

SEQ ID NO: 283037 - protein, 15 aa, Artificial Sequence
  Description of Artificial Sequence: Synthetic peptide
  Seed: HIHIFSFTGEEMATK
HIHYFSMTVEEPATK

SEQ ID NO: 283038 - protein, 15 aa, Artificial Sequence
  Description of Artificial Sequence: Synthetic peptide
  Seed: HIHIFSFTGEEMATK
HIHYFSMTVEEQATK

SEQ ID NO: 283039 - protein, 15 aa, Artificial Sequence
  Description of Artificial Sequence: Synthetic peptide
  Seed: HIHIFSFTGEEMATK
HIHYFSMTVEERATK

SEQ ID NO: 283040 - protein, 15 aa, Artificial Sequence
  Description of Artificial Sequence: Synthetic peptide
  Seed: HIHIFSFTGEEMATK
HIHYFSMTVEESATK

SEQ ID NO: 283041 - protein, 15 aa, Artificial Sequence
  Description of Artificial Sequence: Synthetic peptide
  Seed: HIHIFSFTGEEMATK
HIHYFSMTVEETATK

SEQ ID NO: 283042 - protein, 15 aa, Artificial Sequence
  Description of Artificial Sequence: Synthetic peptide
  Seed: HIHIFSFTGEEMATK
HIHYFSMTVEEVATK

SEQ ID NO: 283043 - protein, 15 aa, Artificial Sequence
  Description of Artificial Sequence: Synthetic peptide
  Seed: HIHIFSFTGEEMATK
HIHYFSMTVEEYATK

SEQ ID NO: 283044 - protein, 15 aa, Artificial Sequence
  Description of Artificial Sequence: Synthetic peptide
  Seed: HIHIFSFTGEEMATK
HIHYFSMTWEEFATK

SEQ ID NO: 283045 - protein, 15 aa, Artificial Sequence
  Description of Artificial Sequence: Synthetic peptide
  Seed: HIHIFSFTGEEMATK
HIHYFSMTWEEIATK

SEQ ID NO: 283046 - protein, 15 aa, Artificial Sequence
  Description of Artificial Sequence: Synthetic peptide
  Seed: HIHIFSFTGEEMATK
HIHYFSMTWEELATK

SEQ ID NO: 283047 - protein, 15 aa, Artificial Sequence
  Description of Artificial Sequence: Synthetic peptide
  Seed: HIHIFSFTGEEMATK
HIHYFSMTWEEVATK

SEQ ID NO: 283048 - protein, 15 aa, Artificial Sequence
  Description of Artificial Sequence: Synthetic peptide
  Seed: HIHIFSFTGEEMATK
HIHYFSMTYEEFATK

SEQ ID NO: 283049 - protein, 15 aa, Artificial Sequence
  Description of Artificial Sequence: Synthetic peptide
  Seed: HIHIFSFTGEEMATK
HIHYFSMTYEEIATK

SEQ ID NO: 283050 - protein, 15 aa, Artificial Sequence
  Description of Artificial Sequence: Synthetic peptide
  Seed: HIHIFSFTGEEMATK
HIHYFSMTYEELATK

SEQ ID NO: 283051 - protein, 15 aa, Artificial Sequence
  Description of Artificial Sequence: Synthetic peptide
  Seed: HIHIFSFTGEEMATK
HIHYFSMTYEEMATK

SEQ ID NO: 283052 - protein, 15 aa, Artificial Sequence
  Description of Artificial Sequence: Synthetic peptide
  Seed: HIHIFSFTGEEMATK
HIHYFSMTYEEVATK

SEQ ID NO: 283053 - protein, 15 aa, Artificial Sequence
  Description of Artificial Sequence: Synthetic peptide
  Seed: HIHIFSFTGEEMATK
HIHYFSNTFEEAATK

SEQ ID NO: 283054 - protein, 15 aa, Artificial Sequence
  Description of Artificial Sequence: Synthetic peptide
  Seed: HIHIFSFTGEEMATK
HIHYFSNTFEEFATK

SEQ ID NO: 283055 - protein, 15 aa, Artificial Sequence
  Description of Artificial Sequence: Synthetic peptide
  Seed: HIHIFSFTGEEMATK
HIHYFSNTFEEIATK

SEQ ID NO: 283056 - protein, 15 aa, Artificial Sequence
  Description of Artificial Sequence: Synthetic peptide
  Seed: HIHIFSFTGEEMATK
HIHYFSNTFEELATK

SEQ ID NO: 283057 - protein, 15 aa, Artificial Sequence
  Description of Artificial Sequence: Synthetic peptide
  Seed: HIHIFSFTGEEMATK
HIHYFSNTFEEMATK

SEQ ID NO: 283058 - protein, 15 aa, Artificial Sequence
  Description of Artificial Sequence: Synthetic peptide
  Seed: HIHIFSFTGEEMATK
HIHYFSNTFEETATK

SEQ ID NO: 283059 - protein, 15 aa, Artificial Sequence
  Description of Artificial Sequence: Synthetic peptide
  Seed: HIHIFSFTGEEMATK
HIHYFSNTFEEVATK

SEQ ID NO: 283060 - protein, 15 aa, Artificial Sequence
  Description of Artificial Sequence: Synthetic peptide
  Seed: HIHIFSFTGEEMATK
HIHYFSNTFEEYATK

SEQ ID NO: 283061 - protein, 15 aa, Artificial Sequence
  Description of Artificial Sequence: Synthetic peptide
  Seed: HIHIFSFTGEEMATK
HIHYFSNTYEELATK

SEQ ID NO: 283062 - protein, 15 aa, Artificial Sequence
  Description of Artificial Sequence: Synthetic peptide
  Seed: HIHIFSFTGEEMATK
HIHYFSQTAEEAATK

SEQ ID NO: 283063 - protein, 15 aa, Artificial Sequence
  Description of Artificial Sequence: Synthetic peptide
  Seed: HIHIFSFTGEEMATK
HIHYFSQTAEEIATK

SEQ ID NO: 283064 - protein, 15 aa, Artificial Sequence
  Description of Artificial Sequence: Synthetic peptide
  Seed: HIHIFSFTGEEMATK
HIHYFSQTAEELATK

SEQ ID NO: 283065 - protein, 15 aa, Artificial Sequence
  Description of Artificial Sequence: Synthetic peptide
  Seed: HIHIFSFTGEEMATK
HIHYFSQTAEEMATK

SEQ ID NO: 283066 - protein, 15 aa, Artificial Sequence
  Description of Artificial Sequence: Synthetic peptide
  Seed: HIHIFSFTGEEMATK
HIHYFSQTAEESATK

SEQ ID NO: 283067 - protein, 15 aa, Artificial Sequence
  Description of Artificial Sequence: Synthetic peptide
  Seed: HIHIFSFTGEEMATK
HIHYFSQTAEETATK

SEQ ID NO: 283068 - protein, 15 aa, Artificial Sequence
  Description of Artificial Sequence: Synthetic peptide
  Seed: HIHIFSFTGEEMATK
HIHYFSQTAEEVATK

SEQ ID NO: 283069 - protein, 15 aa, Artificial Sequence
  Description of Artificial Sequence: Synthetic peptide
  Seed: HIHIFSFTGEEMATK
HIHYFSQTFEEAATK

SEQ ID NO: 283070 - protein, 15 aa, Artificial Sequence
  Description of Artificial Sequence: Synthetic peptide
  Seed: HIHIFSFTGEEMATK
HIHYFSQTFEEFATK

SEQ ID NO: 283071 - protein, 15 aa, Artificial Sequence
  Description of Artificial Sequence: Synthetic peptide
  Seed: HIHIFSFTGEEMATK
HIHYFSQTFEEIATK

SEQ ID NO: 283072 - protein, 15 aa, Artificial Sequence
  Description of Artificial Sequence: Synthetic peptide
  Seed: HIHIFSFTGEEMATK
HIHYFSQTFEELATK

SEQ ID NO: 283073 - protein, 15 aa, Artificial Sequence
  Description of Artificial Sequence: Synthetic peptide
  Seed: HIHIFSFTGEEMATK
HIHYFSQTFEEMATK

SEQ ID NO: 283074 - protein, 15 aa, Artificial Sequence
  Description of Artificial Sequence: Synthetic peptide
  Seed: HIHIFSFTGEEMATK
HIHYFSQTFEETATK

SEQ ID NO: 283075 - protein, 15 aa, Artificial Sequence
  Description of Artificial Sequence: Synthetic peptide
  Seed: HIHIFSFTGEEMATK
HIHYFSQTFEEVATK

SEQ ID NO: 283076 - protein, 15 aa, Artificial Sequence
  Description of Artificial Sequence: Synthetic peptide
  Seed: HIHIFSFTGEEMATK
HIHYFSQTFEEYATK

SEQ ID NO: 283077 - protein, 15 aa, Artificial Sequence
  Description of Artificial Sequence: Synthetic peptide
  Seed: HIHIFSFTGEEMATK
HIHYFSQTGEEAATK

SEQ ID NO: 283078 - protein, 15 aa, Artificial Sequence
  Description of Artificial Sequence: Synthetic peptide
  Seed: HIHIFSFTGEEMATK
HIHYFSQTGEEIATK

SEQ ID NO: 283079 - protein, 15 aa, Artificial Sequence
  Description of Artificial Sequence: Synthetic peptide
  Seed: HIHIFSFTGEEMATK
HIHYFSQTGEELATK

SEQ ID NO: 283080 - protein, 15 aa, Artificial Sequence
  Description of Artificial Sequence: Synthetic peptide
  Seed: HIHIFSFTGEEMATK
HIHYFSQTGEEVATK

SEQ ID NO: 283081 - protein, 15 aa, Artificial Sequence
  Description of Artificial Sequence: Synthetic peptide
  Seed: HIHIFSFTGEEMATK
HIHYFSQTIEEAATK

SEQ ID NO: 283082 - protein, 15 aa, Artificial Sequence
  Description of Artificial Sequence: Synthetic peptide
  Seed: HIHIFSFTGEEMATK
HIHYFSQTIEESATK

SEQ ID NO: 283083 - protein, 15 aa, Artificial Sequence
  Description of Artificial Sequence: Synthetic peptide
  Seed: HIHIFSFTGEEMATK
HIHYFSQTLEEIATK

SEQ ID NO: 283084 - protein, 15 aa, Artificial Sequence
  Description of Artificial Sequence: Synthetic peptide
  Seed: HIHIFSFTGEEMATK
HIHYFSQTLEELATK

SEQ ID NO: 283085 - protein, 15 aa, Artificial Sequence
  Description of Artificial Sequence: Synthetic peptide
  Seed: HIHIFSFTGEEMATK
HIHYFSQTPEELATK

SEQ ID NO: 283086 - protein, 15 aa, Artificial Sequence
  Description of Artificial Sequence: Synthetic peptide
  Seed: HIHIFSFTGEEMATK
HIHYFSQTSEEAATK

SEQ ID NO: 283087 - protein, 15 aa, Artificial Sequence
  Description of Artificial Sequence: Synthetic peptide
  Seed: HIHIFSFTGEEMATK
HIHYFSQTSEEIATK

SEQ ID NO: 283088 - protein, 15 aa, Artificial Sequence
  Description of Artificial Sequence: Synthetic peptide
  Seed: HIHIFSFTGEEMATK
HIHYFSQTSEELATK

SEQ ID NO: 283089 - protein, 15 aa, Artificial Sequence
  Description of Artificial Sequence: Synthetic peptide
  Seed: HIHIFSFTGEEMATK
HIHYFSQTSEEVATK

SEQ ID NO: 283090 - protein, 15 aa, Artificial Sequence
  Description of Artificial Sequence: Synthetic peptide
  Seed: HIHIFSFTGEEMATK
HIHYFSQTVEEAATK

SEQ ID NO: 283091 - protein, 15 aa, Artificial Sequence
  Description of Artificial Sequence: Synthetic peptide
  Seed: HIHIFSFTGEEMATK
HIHYFSQTVEESATK

SEQ ID NO: 283092 - protein, 15 aa, Artificial Sequence
  Description of Artificial Sequence: Synthetic peptide
  Seed: HIHIFSFTGEEMATK
HIHYFSQTWEELATK

SEQ ID NO: 283093 - protein, 15 aa, Artificial Sequence
  Description of Artificial Sequence: Synthetic peptide
  Seed: HIHIFSFTGEEMATK
HIHYFSQTYEEIATK

SEQ ID NO: 283094 - protein, 15 aa, Artificial Sequence
  Description of Artificial Sequence: Synthetic peptide
  Seed: HIHIFSFTGEEMATK
HIHYFSQTYEELATK

SEQ ID NO: 283095 - protein, 15 aa, Artificial Sequence
  Description of Artificial Sequence: Synthetic peptide
  Seed: HIHIFSFTGEEMATK
HIHYFSQTYEEVATK

SEQ ID NO: 283096 - protein, 15 aa, Artificial Sequence
  Description of Artificial Sequence: Synthetic peptide
  Seed: HIHIFSFTGEEMATK
HIHYFSRTFEEFATK

SEQ ID NO: 283097 - protein, 15 aa, Artificial Sequence
  Description of Artificial Sequence: Synthetic peptide
  Seed: HIHIFSFTGEEMATK
HIHYFSRTFEEIATK

SEQ ID NO: 283098 - protein, 15 aa, Artificial Sequence
  Description of Artificial Sequence: Synthetic peptide
  Seed: HIHIFSFTGEEMATK
HIHYFSRTFEELATK

SEQ ID NO: 283099 - protein, 15 aa, Artificial Sequence
  Description of Artificial Sequence: Synthetic peptide
  Seed: HIHIFSFTGEEMATK
HIHYFSRTFEEMATK

SEQ ID NO: 283100 - protein, 15 aa, Artificial Sequence
  Description of Artificial Sequence: Synthetic peptide
  Seed: HIHIFSFTGEEMATK
HIHYFSRTFEEVATK

SEQ ID NO: 283101 - protein, 15 aa, Artificial Sequence
  Description of Artificial Sequence: Synthetic peptide
  Seed: HIHIFSFTGEEMATK
HIHYFSSTAEEAATK

SEQ ID NO: 283102 - protein, 15 aa, Artificial Sequence
  Description of Artificial Sequence: Synthetic peptide
  Seed: HIHIFSFTGEEMATK
HIHYFSSTAEEIATK

SEQ ID NO: 283103 - protein, 15 aa, Artificial Sequence
  Description of Artificial Sequence: Synthetic peptide
  Seed: HIHIFSFTGEEMATK
HIHYFSSTAEELATK

SEQ ID NO: 283104 - protein, 15 aa, Artificial Sequence
  Description of Artificial Sequence: Synthetic peptide
  Seed: HIHIFSFTGEEMATK
HIHYFSSTAEESATK

SEQ ID NO: 283105 - protein, 15 aa, Artificial Sequence
  Description of Artificial Sequence: Synthetic peptide
  Seed: HIHIFSFTGEEMATK
HIHYFSSTAEEVATK

SEQ ID NO: 283106 - protein, 15 aa, Artificial Sequence
  Description of Artificial Sequence: Synthetic peptide
  Seed: HIHIFSFTGEEMATK
HIHYFSSTFEEAATK

SEQ ID NO: 283107 - protein, 15 aa, Artificial Sequence
  Description of Artificial Sequence: Synthetic peptide
  Seed: HIHIFSFTGEEMATK
HIHYFSSTFEEDATK

SEQ ID NO: 283108 - protein, 15 aa, Artificial Sequence
  Description of Artificial Sequence: Synthetic peptide
  Seed: HIHIFSFTGEEMATK
HIHYFSSTFEEEATK

SEQ ID NO: 283109 - protein, 15 aa, Artificial Sequence
  Description of Artificial Sequence: Synthetic peptide
  Seed: HIHIFSFTGEEMATK
HIHYFSSTFEEFATK

SEQ ID NO: 283110 - protein, 15 aa, Artificial Sequence
  Description of Artificial Sequence: Synthetic peptide
  Seed: HIHIFSFTGEEMATK
HIHYFSSTFEEIATK

SEQ ID NO: 283111 - protein, 15 aa, Artificial Sequence
  Description of Artificial Sequence: Synthetic peptide
  Seed: HIHIFSFTGEEMATK
HIHYFSSTFEELATK

SEQ ID NO: 283112 - protein, 15 aa, Artificial Sequence
  Description of Artificial Sequence: Synthetic peptide
  Seed: HIHIFSFTGEEMATK
HIHYFSSTFEEMATK

SEQ ID NO: 283113 - protein, 15 aa, Artificial Sequence
  Description of Artificial Sequence: Synthetic peptide
  Seed: HIHIFSFTGEEMATK
HIHYFSSTFEENATK

SEQ ID NO: 283114 - protein, 15 aa, Artificial Sequence
  Description of Artificial Sequence: Synthetic peptide
  Seed: HIHIFSFTGEEMATK
HIHYFSSTFEEQATK

SEQ ID NO: 283115 - protein, 15 aa, Artificial Sequence
  Description of Artificial Sequence: Synthetic peptide
  Seed: HIHIFSFTGEEMATK
HIHYFSSTFEESATK

SEQ ID NO: 283116 - protein, 15 aa, Artificial Sequence
  Description of Artificial Sequence: Synthetic peptide
  Seed: HIHIFSFTGEEMATK
HIHYFSSTFEETATK

SEQ ID NO: 283117 - protein, 15 aa, Artificial Sequence
  Description of Artificial Sequence: Synthetic peptide
  Seed: HIHIFSFTGEEMATK
HIHYFSSTFEEVATK

SEQ ID NO: 283118 - protein, 15 aa, Artificial Sequence
  Description of Artificial Sequence: Synthetic peptide
  Seed: HIHIFSFTGEEMATK
HIHYFSSTFEEWATK

SEQ ID NO: 283119 - protein, 15 aa, Artificial Sequence
  Description of Artificial Sequence: Synthetic peptide
  Seed: HIHIFSFTGEEMATK
HIHYFSSTFEEYATK

SEQ ID NO: 283120 - protein, 15 aa, Artificial Sequence
  Description of Artificial Sequence: Synthetic peptide
  Seed: HIHIFSFTGEEMATK
HIHYFSSTGEELATK

SEQ ID NO: 283121 - protein, 15 aa, Artificial Sequence
  Description of Artificial Sequence: Synthetic peptide
  Seed: HIHIFSFTGEEMATK
HIHYFSSTGEEVATK

SEQ ID NO: 283122 - protein, 15 aa, Artificial Sequence
  Description of Artificial Sequence: Synthetic peptide
  Seed: HIHIFSFTGEEMATK
HIHYFSSTIEEFATK

SEQ ID NO: 283123 - protein, 15 aa, Artificial Sequence
  Description of Artificial Sequence: Synthetic peptide
  Seed: HIHIFSFTGEEMATK
HIHYFSSTIEEIATK

SEQ ID NO: 283124 - protein, 15 aa, Artificial Sequence
  Description of Artificial Sequence: Synthetic peptide
  Seed: HIHIFSFTGEEMATK
HIHYFSSTIEELATK

SEQ ID NO: 283125 - protein, 15 aa, Artificial Sequence
  Description of Artificial Sequence: Synthetic peptide
  Seed: HIHIFSFTGEEMATK
HIHYFSSTIEEVATK

SEQ ID NO: 283126 - protein, 15 aa, Artificial Sequence
  Description of Artificial Sequence: Synthetic peptide
  Seed: HIHIFSFTGEEMATK
HIHYFSSTLEEFATK

SEQ ID NO: 283127 - protein, 15 aa, Artificial Sequence
  Description of Artificial Sequence: Synthetic peptide
  Seed: HIHIFSFTGEEMATK
HIHYFSSTLEEIATK

SEQ ID NO: 283128 - protein, 15 aa, Artificial Sequence
  Description of Artificial Sequence: Synthetic peptide
  Seed: HIHIFSFTGEEMATK
HIHYFSSTLEELATK

SEQ ID NO: 283129 - protein, 15 aa, Artificial Sequence
  Description of Artificial Sequence: Synthetic peptide
  Seed: HIHIFSFTGEEMATK
HIHYFSSTLEEMATK

SEQ ID NO: 283130 - protein, 15 aa, Artificial Sequence
  Description of Artificial Sequence: Synthetic peptide
  Seed: HIHIFSFTGEEMATK
HIHYFSSTLEEVATK

SEQ ID NO: 283131 - protein, 15 aa, Artificial Sequence
  Description of Artificial Sequence: Synthetic peptide
  Seed: HIHIFSFTGEEMATK
HIHYFSSTMEEFATK

SEQ ID NO: 283132 - protein, 15 aa, Artificial Sequence
  Description of Artificial Sequence: Synthetic peptide
  Seed: HIHIFSFTGEEMATK
HIHYFSSTMEEIATK

SEQ ID NO: 283133 - protein, 15 aa, Artificial Sequence
  Description of Artificial Sequence: Synthetic peptide
  Seed: HIHIFSFTGEEMATK
HIHYFSSTMEELATK

SEQ ID NO: 283134 - protein, 15 aa, Artificial Sequence
  Description of Artificial Sequence: Synthetic peptide
  Seed: HIHIFSFTGEEMATK
HIHYFSSTSEELATK

SEQ ID NO: 283135 - protein, 15 aa, Artificial Sequence
  Description of Artificial Sequence: Synthetic peptide
  Seed: HIHIFSFTGEEMATK
HIHYFSSTSEEVATK

SEQ ID NO: 283136 - protein, 15 aa, Artificial Sequence
  Description of Artificial Sequence: Synthetic peptide
  Seed: HIHIFSFTGEEMATK
HIHYFSSTVEEAATK

SEQ ID NO: 283137 - protein, 15 aa, Artificial Sequence
  Description of Artificial Sequence: Synthetic peptide
  Seed: HIHIFSFTGEEMATK
HIHYFSSTWEEFATK

SEQ ID NO: 283138 - protein, 15 aa, Artificial Sequence
  Description of Artificial Sequence: Synthetic peptide
  Seed: HIHIFSFTGEEMATK
HIHYFSSTWEEIATK

SEQ ID NO: 283139 - protein, 15 aa, Artificial Sequence
  Description of Artificial Sequence: Synthetic peptide
  Seed: HIHIFSFTGEEMATK
HIHYFSSTWEELATK

SEQ ID NO: 283140 - protein, 15 aa, Artificial Sequence
  Description of Artificial Sequence: Synthetic peptide
  Seed: HIHIFSFTGEEMATK
HIHYFSSTWEEMATK

SEQ ID NO: 283141 - protein, 15 aa, Artificial Sequence
  Description of Artificial Sequence: Synthetic peptide
  Seed: HIHIFSFTGEEMATK
HIHYFSSTWEEVATK

SEQ ID NO: 283142 - protein, 15 aa, Artificial Sequence
  Description of Artificial Sequence: Synthetic peptide
  Seed: HIHIFSFTGEEMATK
HIHYFSSTYEEFATK

SEQ ID NO: 283143 - protein, 15 aa, Artificial Sequence
  Description of Artificial Sequence: Synthetic peptide
  Seed: HIHIFSFTGEEMATK
HIHYFSSTYEEIATK

SEQ ID NO: 283144 - protein, 15 aa, Artificial Sequence
  Description of Artificial Sequence: Synthetic peptide
  Seed: HIHIFSFTGEEMATK
HIHYFSSTYEELATK

SEQ ID NO: 283145 - protein, 15 aa, Artificial Sequence
  Description of Artificial Sequence: Synthetic peptide
  Seed: HIHIFSFTGEEMATK
HIHYFSSTYEEMATK

SEQ ID NO: 283146 - protein, 15 aa, Artificial Sequence
  Description of Artificial Sequence: Synthetic peptide
  Seed: HIHIFSFTGEEMATK
HIHYFSSTYEEVATK

SEQ ID NO: 283147 - protein, 15 aa, Artificial Sequence
  Description of Artificial Sequence: Synthetic peptide
  Seed: HIHIFSFTGEEMATK
HIHYFSTTAEEAATK

SEQ ID NO: 283148 - protein, 15 aa, Artificial Sequence
  Description of Artificial Sequence: Synthetic peptide
  Seed: HIHIFSFTGEEMATK
HIHYFSTTAEELATK

SEQ ID NO: 283149 - protein, 15 aa, Artificial Sequence
  Description of Artificial Sequence: Synthetic peptide
  Seed: HIHIFSFTGEEMATK
HIHYFSTTFEEAATK

SEQ ID NO: 283150 - protein, 15 aa, Artificial Sequence
  Description of Artificial Sequence: Synthetic peptide
  Seed: HIHIFSFTGEEMATK
HIHYFSTTFEEDATK

SEQ ID NO: 283151 - protein, 15 aa, Artificial Sequence
  Description of Artificial Sequence: Synthetic peptide
  Seed: HIHIFSFTGEEMATK
HIHYFSTTFEEEATK

SEQ ID NO: 283152 - protein, 15 aa, Artificial Sequence
  Description of Artificial Sequence: Synthetic peptide
  Seed: HIHIFSFTGEEMATK
HIHYFSTTFEEFATK

SEQ ID NO: 283153 - protein, 15 aa, Artificial Sequence
  Description of Artificial Sequence: Synthetic peptide
  Seed: HIHIFSFTGEEMATK
HIHYFSTTFEEHATK

SEQ ID NO: 283154 - protein, 15 aa, Artificial Sequence
  Description of Artificial Sequence: Synthetic peptide
  Seed: HIHIFSFTGEEMATK
HIHYFSTTFEEIATK

SEQ ID NO: 283155 - protein, 15 aa, Artificial Sequence
  Description of Artificial Sequence: Synthetic peptide
  Seed: HIHIFSFTGEEMATK
HIHYFSTTFEELATK

SEQ ID NO: 283156 - protein, 15 aa, Artificial Sequence
  Description of Artificial Sequence: Synthetic peptide
  Seed: HIHIFSFTGEEMATK
HIHYFSTTFEEMATK

SEQ ID NO: 283157 - protein, 15 aa, Artificial Sequence
  Description of Artificial Sequence: Synthetic peptide
  Seed: HIHIFSFTGEEMATK
HIHYFSTTFEENATK

SEQ ID NO: 283158 - protein, 15 aa, Artificial Sequence
  Description of Artificial Sequence: Synthetic peptide
  Seed: HIHIFSFTGEEMATK
HIHYFSTTFEEPATK

SEQ ID NO: 283159 - protein, 15 aa, Artificial Sequence
  Description of Artificial Sequence: Synthetic peptide
  Seed: HIHIFSFTGEEMATK
HIHYFSTTFEEQATK

SEQ ID NO: 283160 - protein, 15 aa, Artificial Sequence
  Description of Artificial Sequence: Synthetic peptide
  Seed: HIHIFSFTGEEMATK
HIHYFSTTFEERATK

SEQ ID NO: 283161 - protein, 15 aa, Artificial Sequence
  Description of Artificial Sequence: Synthetic peptide
  Seed: HIHIFSFTGEEMATK
HIHYFSTTFEESATK

SEQ ID NO: 283162 - protein, 15 aa, Artificial Sequence
  Description of Artificial Sequence: Synthetic peptide
  Seed: HIHIFSFTGEEMATK
HIHYFSTTFEETATK

SEQ ID NO: 283163 - protein, 15 aa, Artificial Sequence
  Description of Artificial Sequence: Synthetic peptide
  Seed: HIHIFSFTGEEMATK
HIHYFSTTFEEVATK

SEQ ID NO: 283164 - protein, 15 aa, Artificial Sequence
  Description of Artificial Sequence: Synthetic peptide
  Seed: HIHIFSFTGEEMATK
HIHYFSTTFEEWATK

SEQ ID NO: 283165 - protein, 15 aa, Artificial Sequence
  Description of Artificial Sequence: Synthetic peptide
  Seed: HIHIFSFTGEEMATK
HIHYFSTTFEEYATK

SEQ ID NO: 283166 - protein, 15 aa, Artificial Sequence
  Description of Artificial Sequence: Synthetic peptide
  Seed: HIHIFSFTGEEMATK
HIHYFSTTIEEFATK

SEQ ID NO: 283167 - protein, 15 aa, Artificial Sequence
  Description of Artificial Sequence: Synthetic peptide
  Seed: HIHIFSFTGEEMATK
HIHYFSTTIEEIATK

SEQ ID NO: 283168 - protein, 15 aa, Artificial Sequence
  Description of Artificial Sequence: Synthetic peptide
  Seed: HIHIFSFTGEEMATK
HIHYFSTTIEELATK

SEQ ID NO: 283169 - protein, 15 aa, Artificial Sequence
  Description of Artificial Sequence: Synthetic peptide
  Seed: HIHIFSFTGEEMATK
HIHYFSTTIEEVATK

SEQ ID NO: 283170 - protein, 15 aa, Artificial Sequence
  Description of Artificial Sequence: Synthetic peptide
  Seed: HIHIFSFTGEEMATK
HIHYFSTTLEEFATK

SEQ ID NO: 283171 - protein, 15 aa, Artificial Sequence
  Description of Artificial Sequence: Synthetic peptide
  Seed: HIHIFSFTGEEMATK
HIHYFSTTLEEIATK

SEQ ID NO: 283172 - protein, 15 aa, Artificial Sequence
  Description of Artificial Sequence: Synthetic peptide
  Seed: HIHIFSFTGEEMATK
HIHYFSTTLEELATK

SEQ ID NO: 283173 - protein, 15 aa, Artificial Sequence
  Description of Artificial Sequence: Synthetic peptide
  Seed: HIHIFSFTGEEMATK
HIHYFSTTLEEMATK

SEQ ID NO: 283174 - protein, 15 aa, Artificial Sequence
  Description of Artificial Sequence: Synthetic peptide
  Seed: HIHIFSFTGEEMATK
HIHYFSTTLEEVATK

SEQ ID NO: 283175 - protein, 15 aa, Artificial Sequence
  Description of Artificial Sequence: Synthetic peptide
  Seed: HIHIFSFTGEEMATK
HIHYFSTTMEEFATK

SEQ ID NO: 283176 - protein, 15 aa, Artificial Sequence
  Description of Artificial Sequence: Synthetic peptide
  Seed: HIHIFSFTGEEMATK
HIHYFSTTMEEIATK

SEQ ID NO: 283177 - protein, 15 aa, Artificial Sequence
  Description of Artificial Sequence: Synthetic peptide
  Seed: HIHIFSFTGEEMATK
HIHYFSTTMEELATK

SEQ ID NO: 283178 - protein, 15 aa, Artificial Sequence
  Description of Artificial Sequence: Synthetic peptide
  Seed: HIHIFSFTGEEMATK
HIHYFSTTMEEVATK

SEQ ID NO: 283179 - protein, 15 aa, Artificial Sequence
  Description of Artificial Sequence: Synthetic peptide
  Seed: HIHIFSFTGEEMATK
HIHYFSTTVEELATK

SEQ ID NO: 283180 - protein, 15 aa, Artificial Sequence
  Description of Artificial Sequence: Synthetic peptide
  Seed: HIHIFSFTGEEMATK
HIHYFSTTWEEFATK

SEQ ID NO: 283181 - protein, 15 aa, Artificial Sequence
  Description of Artificial Sequence: Synthetic peptide
  Seed: HIHIFSFTGEEMATK
HIHYFSTTWEEIATK

SEQ ID NO: 283182 - protein, 15 aa, Artificial Sequence
  Description of Artificial Sequence: Synthetic peptide
  Seed: HIHIFSFTGEEMATK
HIHYFSTTWEELATK

SEQ ID NO: 283183 - protein, 15 aa, Artificial Sequence
  Description of Artificial Sequence: Synthetic peptide
  Seed: HIHIFSFTGEEMATK
HIHYFSTTWEEMATK

SEQ ID NO: 283184 - protein, 15 aa, Artificial Sequence
  Description of Artificial Sequence: Synthetic peptide
  Seed: HIHIFSFTGEEMATK
HIHYFSTTWEEVATK

SEQ ID NO: 283185 - protein, 15 aa, Artificial Sequence
  Description of Artificial Sequence: Synthetic peptide
  Seed: HIHIFSFTGEEMATK
HIHYFSTTYEEFATK

SEQ ID NO: 283186 - protein, 15 aa, Artificial Sequence
  Description of Artificial Sequence: Synthetic peptide
  Seed: HIHIFSFTGEEMATK
HIHYFSTTYEEIATK

SEQ ID NO: 283187 - protein, 15 aa, Artificial Sequence
  Description of Artificial Sequence: Synthetic peptide
  Seed: HIHIFSFTGEEMATK
HIHYFSTTYEELATK

SEQ ID NO: 283188 - protein, 15 aa, Artificial Sequence
  Description of Artificial Sequence: Synthetic peptide
  Seed: HIHIFSFTGEEMATK
HIHYFSTTYEEMATK

SEQ ID NO: 283189 - protein, 15 aa, Artificial Sequence
  Description of Artificial Sequence: Synthetic peptide
  Seed: HIHIFSFTGEEMATK
HIHYFSTTYEEVATK

SEQ ID NO: 283190 - protein, 15 aa, Artificial Sequence
  Description of Artificial Sequence: Synthetic peptide
  Seed: HIHIFSFTGEEMATK
HIHYFSVTAEEAATK

SEQ ID NO: 283191 - protein, 15 aa, Artificial Sequence
  Description of Artificial Sequence: Synthetic peptide
  Seed: HIHIFSFTGEEMATK
HIHYFSVTAEEGATK

SEQ ID NO: 283192 - protein, 15 aa, Artificial Sequence
  Description of Artificial Sequence: Synthetic peptide
  Seed: HIHIFSFTGEEMATK
HIHYFSVTAEEHATK

SEQ ID NO: 283193 - protein, 15 aa, Artificial Sequence
  Description of Artificial Sequence: Synthetic peptide
  Seed: HIHIFSFTGEEMATK
HIHYFSVTAEEIATK

SEQ ID NO: 283194 - protein, 15 aa, Artificial Sequence
  Description of Artificial Sequence: Synthetic peptide
  Seed: HIHIFSFTGEEMATK
HIHYFSVTAEELATK

SEQ ID NO: 283195 - protein, 15 aa, Artificial Sequence
  Description of Artificial Sequence: Synthetic peptide
  Seed: HIHIFSFTGEEMATK
HIHYFSVTAEEMATK

SEQ ID NO: 283196 - protein, 15 aa, Artificial Sequence
  Description of Artificial Sequence: Synthetic peptide
  Seed: HIHIFSFTGEEMATK
HIHYFSVTAEENATK

SEQ ID NO: 283197 - protein, 15 aa, Artificial Sequence
  Description of Artificial Sequence: Synthetic peptide
  Seed: HIHIFSFTGEEMATK
HIHYFSVTAEESATK

SEQ ID NO: 283198 - protein, 15 aa, Artificial Sequence
  Description of Artificial Sequence: Synthetic peptide
  Seed: HIHIFSFTGEEMATK
HIHYFSVTAEETATK

SEQ ID NO: 283199 - protein, 15 aa, Artificial Sequence
  Description of Artificial Sequence: Synthetic peptide
  Seed: HIHIFSFTGEEMATK
HIHYFSVTAEEVATK

SEQ ID NO: 283200 - protein, 15 aa, Artificial Sequence
  Description of Artificial Sequence: Synthetic peptide
  Seed: HIHIFSFTGEEMATK
HIHYFSVTFEEAATK

SEQ ID NO: 283201 - protein, 15 aa, Artificial Sequence
  Description of Artificial Sequence: Synthetic peptide
  Seed: HIHIFSFTGEEMATK
HIHYFSVTFEEDATK

SEQ ID NO: 283202 - protein, 15 aa, Artificial Sequence
  Description of Artificial Sequence: Synthetic peptide
  Seed: HIHIFSFTGEEMATK
HIHYFSVTFEEEATK

SEQ ID NO: 283203 - protein, 15 aa, Artificial Sequence
  Description of Artificial Sequence: Synthetic peptide
  Seed: HIHIFSFTGEEMATK
HIHYFSVTFEEFATK

SEQ ID NO: 283204 - protein, 15 aa, Artificial Sequence
  Description of Artificial Sequence: Synthetic peptide
  Seed: HIHIFSFTGEEMATK
HIHYFSVTFEEHATK

SEQ ID NO: 283205 - protein, 15 aa, Artificial Sequence
  Description of Artificial Sequence: Synthetic peptide
  Seed: HIHIFSFTGEEMATK
HIHYFSVTFEEIATK

SEQ ID NO: 283206 - protein, 15 aa, Artificial Sequence
  Description of Artificial Sequence: Synthetic peptide
  Seed: HIHIFSFTGEEMATK
HIHYFSVTFEEKATK

SEQ ID NO: 283207 - protein, 15 aa, Artificial Sequence
  Description of Artificial Sequence: Synthetic peptide
  Seed: HIHIFSFTGEEMATK
HIHYFSVTFEELATK

SEQ ID NO: 283208 - protein, 15 aa, Artificial Sequence
  Description of Artificial Sequence: Synthetic peptide
  Seed: HIHIFSFTGEEMATK
HIHYFSVTFEEMATK

SEQ ID NO: 283209 - protein, 15 aa, Artificial Sequence
  Description of Artificial Sequence: Synthetic peptide
  Seed: HIHIFSFTGEEMATK
HIHYFSVTFEENATK

SEQ ID NO: 283210 - protein, 15 aa, Artificial Sequence
  Description of Artificial Sequence: Synthetic peptide
  Seed: HIHIFSFTGEEMATK
HIHYFSVTFEEPATK

SEQ ID NO: 283211 - protein, 15 aa, Artificial Sequence
  Description of Artificial Sequence: Synthetic peptide
  Seed: HIHIFSFTGEEMATK
HIHYFSVTFEEQATK

SEQ ID NO: 283212 - protein, 15 aa, Artificial Sequence
  Description of Artificial Sequence: Synthetic peptide
  Seed: HIHIFSFTGEEMATK
HIHYFSVTFEERATK

SEQ ID NO: 283213 - protein, 15 aa, Artificial Sequence
  Description of Artificial Sequence: Synthetic peptide
  Seed: HIHIFSFTGEEMATK
HIHYFSVTFEESATK

SEQ ID NO: 283214 - protein, 15 aa, Artificial Sequence
  Description of Artificial Sequence: Synthetic peptide
  Seed: HIHIFSFTGEEMATK
HIHYFSVTFEETATK

SEQ ID NO: 283215 - protein, 15 aa, Artificial Sequence
  Description of Artificial Sequence: Synthetic peptide
  Seed: HIHIFSFTGEEMATK
HIHYFSVTFEEVATK

SEQ ID NO: 283216 - protein, 15 aa, Artificial Sequence
  Description of Artificial Sequence: Synthetic peptide
  Seed: HIHIFSFTGEEMATK
HIHYFSVTFEEWATK

SEQ ID NO: 283217 - protein, 15 aa, Artificial Sequence
  Description of Artificial Sequence: Synthetic peptide
  Seed: HIHIFSFTGEEMATK
HIHYFSVTFEEYATK

SEQ ID NO: 283218 - protein, 15 aa, Artificial Sequence
  Description of Artificial Sequence: Synthetic peptide
  Seed: HIHIFSFTGEEMATK
HIHYFSVTGEEAATK

SEQ ID NO: 283219 - protein, 15 aa, Artificial Sequence
  Description of Artificial Sequence: Synthetic peptide
  Seed: HIHIFSFTGEEMATK
HIHYFSVTGEEIATK

SEQ ID NO: 283220 - protein, 15 aa, Artificial Sequence
  Description of Artificial Sequence: Synthetic peptide
  Seed: HIHIFSFTGEEMATK
HIHYFSVTGEELATK

SEQ ID NO: 283221 - protein, 15 aa, Artificial Sequence
  Description of Artificial Sequence: Synthetic peptide
  Seed: HIHIFSFTGEEMATK
HIHYFSVTGEEMATK

SEQ ID NO: 283222 - protein, 15 aa, Artificial Sequence
  Description of Artificial Sequence: Synthetic peptide
  Seed: HIHIFSFTGEEMATK
HIHYFSVTGEESATK

SEQ ID NO: 283223 - protein, 15 aa, Artificial Sequence
  Description of Artificial Sequence: Synthetic peptide
  Seed: HIHIFSFTGEEMATK
HIHYFSVTGEETATK

SEQ ID NO: 283224 - protein, 15 aa, Artificial Sequence
  Description of Artificial Sequence: Synthetic peptide
  Seed: HIHIFSFTGEEMATK
HIHYFSVTGEEVATK

SEQ ID NO: 283225 - protein, 15 aa, Artificial Sequence
  Description of Artificial Sequence: Synthetic peptide
  Seed: HIHIFSFTGEEMATK
HIHYFSVTIEEAATK

SEQ ID NO: 283226 - protein, 15 aa, Artificial Sequence
  Description of Artificial Sequence: Synthetic peptide
  Seed: HIHIFSFTGEEMATK
HIHYFSVTIEEFATK

SEQ ID NO: 283227 - protein, 15 aa, Artificial Sequence
  Description of Artificial Sequence: Synthetic peptide
  Seed: HIHIFSFTGEEMATK
HIHYFSVTIEEIATK

SEQ ID NO: 283228 - protein, 15 aa, Artificial Sequence
  Description of Artificial Sequence: Synthetic peptide
  Seed: HIHIFSFTGEEMATK
HIHYFSVTIEELATK

SEQ ID NO: 283229 - protein, 15 aa, Artificial Sequence
  Description of Artificial Sequence: Synthetic peptide
  Seed: HIHIFSFTGEEMATK
HIHYFSVTIEEMATK

SEQ ID NO: 283230 - protein, 15 aa, Artificial Sequence
  Description of Artificial Sequence: Synthetic peptide
  Seed: HIHIFSFTGEEMATK
HIHYFSVTIEENATK

SEQ ID NO: 283231 - protein, 15 aa, Artificial Sequence
  Description of Artificial Sequence: Synthetic peptide
  Seed: HIHIFSFTGEEMATK
HIHYFSVTIEESATK

SEQ ID NO: 283232 - protein, 15 aa, Artificial Sequence
  Description of Artificial Sequence: Synthetic peptide
  Seed: HIHIFSFTGEEMATK
HIHYFSVTIEETATK

SEQ ID NO: 283233 - protein, 15 aa, Artificial Sequence
  Description of Artificial Sequence: Synthetic peptide
  Seed: HIHIFSFTGEEMATK
HIHYFSVTIEEVATK

SEQ ID NO: 283234 - protein, 15 aa, Artificial Sequence
  Description of Artificial Sequence: Synthetic peptide
  Seed: HIHIFSFTGEEMATK
HIHYFSVTLEEFATK

SEQ ID NO: 283235 - protein, 15 aa, Artificial Sequence
  Description of Artificial Sequence: Synthetic peptide
  Seed: HIHIFSFTGEEMATK
HIHYFSVTLEEIATK

SEQ ID NO: 283236 - protein, 15 aa, Artificial Sequence
  Description of Artificial Sequence: Synthetic peptide
  Seed: HIHIFSFTGEEMATK
HIHYFSVTLEELATK

SEQ ID NO: 283237 - protein, 15 aa, Artificial Sequence
  Description of Artificial Sequence: Synthetic peptide
  Seed: HIHIFSFTGEEMATK
HIHYFSVTLEEMATK

SEQ ID NO: 283238 - protein, 15 aa, Artificial Sequence
  Description of Artificial Sequence: Synthetic peptide
  Seed: HIHIFSFTGEEMATK
HIHYFSVTLEEVATK

SEQ ID NO: 283239 - protein, 15 aa, Artificial Sequence
  Description of Artificial Sequence: Synthetic peptide
  Seed: HIHIFSFTGEEMATK
HIHYFSVTMEEAATK

SEQ ID NO: 283240 - protein, 15 aa, Artificial Sequence
  Description of Artificial Sequence: Synthetic peptide
  Seed: HIHIFSFTGEEMATK
HIHYFSVTMEEFATK

SEQ ID NO: 283241 - protein, 15 aa, Artificial Sequence
  Description of Artificial Sequence: Synthetic peptide
  Seed: HIHIFSFTGEEMATK
HIHYFSVTMEEIATK

SEQ ID NO: 283242 - protein, 15 aa, Artificial Sequence
  Description of Artificial Sequence: Synthetic peptide
  Seed: HIHIFSFTGEEMATK
HIHYFSVTMEELATK

SEQ ID NO: 283243 - protein, 15 aa, Artificial Sequence
  Description of Artificial Sequence: Synthetic peptide
  Seed: HIHIFSFTGEEMATK
HIHYFSVTMEEMATK

SEQ ID NO: 283244 - protein, 15 aa, Artificial Sequence
  Description of Artificial Sequence: Synthetic peptide
  Seed: HIHIFSFTGEEMATK
HIHYFSVTMEEVATK

SEQ ID NO: 283245 - protein, 15 aa, Artificial Sequence
  Description of Artificial Sequence: Synthetic peptide
  Seed: HIHIFSFTGEEMATK
HIHYFSVTNEELATK

SEQ ID NO: 283246 - protein, 15 aa, Artificial Sequence
  Description of Artificial Sequence: Synthetic peptide
  Seed: HIHIFSFTGEEMATK
HIHYFSVTNEEVATK

SEQ ID NO: 283247 - protein, 15 aa, Artificial Sequence
  Description of Artificial Sequence: Synthetic peptide
  Seed: HIHIFSFTGEEMATK
HIHYFSVTPEEAATK

SEQ ID NO: 283248 - protein, 15 aa, Artificial Sequence
  Description of Artificial Sequence: Synthetic peptide
  Seed: HIHIFSFTGEEMATK
HIHYFSVTPEEIATK

SEQ ID NO: 283249 - protein, 15 aa, Artificial Sequence
  Description of Artificial Sequence: Synthetic peptide
  Seed: HIHIFSFTGEEMATK
HIHYFSVTPEELATK

SEQ ID NO: 283250 - protein, 15 aa, Artificial Sequence
  Description of Artificial Sequence: Synthetic peptide
  Seed: HIHIFSFTGEEMATK
HIHYFSVTPEEMATK

SEQ ID NO: 283251 - protein, 15 aa, Artificial Sequence
  Description of Artificial Sequence: Synthetic peptide
  Seed: HIHIFSFTGEEMATK
HIHYFSVTPEENATK

SEQ ID NO: 283252 - protein, 15 aa, Artificial Sequence
  Description of Artificial Sequence: Synthetic peptide
  Seed: HIHIFSFTGEEMATK
HIHYFSVTPEESATK

SEQ ID NO: 283253 - protein, 15 aa, Artificial Sequence
  Description of Artificial Sequence: Synthetic peptide
  Seed: HIHIFSFTGEEMATK
HIHYFSVTPEETATK

SEQ ID NO: 283254 - protein, 15 aa, Artificial Sequence
  Description of Artificial Sequence: Synthetic peptide
  Seed: HIHIFSFTGEEMATK
HIHYFSVTPEEVATK

SEQ ID NO: 283255 - protein, 15 aa, Artificial Sequence
  Description of Artificial Sequence: Synthetic peptide
  Seed: HIHIFSFTGEEMATK
HIHYFSVTSEEAATK

SEQ ID NO: 283256 - protein, 15 aa, Artificial Sequence
  Description of Artificial Sequence: Synthetic peptide
  Seed: HIHIFSFTGEEMATK
HIHYFSVTSEEIATK

SEQ ID NO: 283257 - protein, 15 aa, Artificial Sequence
  Description of Artificial Sequence: Synthetic peptide
  Seed: HIHIFSFTGEEMATK
HIHYFSVTSEELATK

SEQ ID NO: 283258 - protein, 15 aa, Artificial Sequence
  Description of Artificial Sequence: Synthetic peptide
  Seed: HIHIFSFTGEEMATK
HIHYFSVTSEEMATK

SEQ ID NO: 283259 - protein, 15 aa, Artificial Sequence
  Description of Artificial Sequence: Synthetic peptide
  Seed: HIHIFSFTGEEMATK
HIHYFSVTSEENATK

SEQ ID NO: 283260 - protein, 15 aa, Artificial Sequence
  Description of Artificial Sequence: Synthetic peptide
  Seed: HIHIFSFTGEEMATK
HIHYFSVTSEESATK

SEQ ID NO: 283261 - protein, 15 aa, Artificial Sequence
  Description of Artificial Sequence: Synthetic peptide
  Seed: HIHIFSFTGEEMATK
HIHYFSVTSEETATK

SEQ ID NO: 283262 - protein, 15 aa, Artificial Sequence
  Description of Artificial Sequence: Synthetic peptide
  Seed: HIHIFSFTGEEMATK
HIHYFSVTSEEVATK

SEQ ID NO: 283263 - protein, 15 aa, Artificial Sequence
  Description of Artificial Sequence: Synthetic peptide
  Seed: HIHIFSFTGEEMATK
HIHYFSVTTEEAATK

SEQ ID NO: 283264 - protein, 15 aa, Artificial Sequence
  Description of Artificial Sequence: Synthetic peptide
  Seed: HIHIFSFTGEEMATK
HIHYFSVTTEEIATK

SEQ ID NO: 283265 - protein, 15 aa, Artificial Sequence
  Description of Artificial Sequence: Synthetic peptide
  Seed: HIHIFSFTGEEMATK
HIHYFSVTTEELATK

SEQ ID NO: 283266 - protein, 15 aa, Artificial Sequence
  Description of Artificial Sequence: Synthetic peptide
  Seed: HIHIFSFTGEEMATK
HIHYFSVTTEEMATK

SEQ ID NO: 283267 - protein, 15 aa, Artificial Sequence
  Description of Artificial Sequence: Synthetic peptide
  Seed: HIHIFSFTGEEMATK
HIHYFSVTTEENATK

SEQ ID NO: 283268 - protein, 15 aa, Artificial Sequence
  Description of Artificial Sequence: Synthetic peptide
  Seed: HIHIFSFTGEEMATK
HIHYFSVTTEESATK

SEQ ID NO: 283269 - protein, 15 aa, Artificial Sequence
  Description of Artificial Sequence: Synthetic peptide
  Seed: HIHIFSFTGEEMATK
HIHYFSVTTEETATK

SEQ ID NO: 283270 - protein, 15 aa, Artificial Sequence
  Description of Artificial Sequence: Synthetic peptide
  Seed: HIHIFSFTGEEMATK
HIHYFSVTTEEVATK

SEQ ID NO: 283271 - protein, 15 aa, Artificial Sequence
  Description of Artificial Sequence: Synthetic peptide
  Seed: HIHIFSFTGEEMATK
HIHYFSVTVEEAATK

SEQ ID NO: 283272 - protein, 15 aa, Artificial Sequence
  Description of Artificial Sequence: Synthetic peptide
  Seed: HIHIFSFTGEEMATK
HIHYFSVTVEEHATK

SEQ ID NO: 283273 - protein, 15 aa, Artificial Sequence
  Description of Artificial Sequence: Synthetic peptide
  Seed: HIHIFSFTGEEMATK
HIHYFSVTVEEIATK

SEQ ID NO: 283274 - protein, 15 aa, Artificial Sequence
  Description of Artificial Sequence: Synthetic peptide
  Seed: HIHIFSFTGEEMATK
HIHYFSVTVEELATK

SEQ ID NO: 283275 - protein, 15 aa, Artificial Sequence
  Description of Artificial Sequence: Synthetic peptide
  Seed: HIHIFSFTGEEMATK
HIHYFSVTVEEMATK

SEQ ID NO: 283276 - protein, 15 aa, Artificial Sequence
  Description of Artificial Sequence: Synthetic peptide
  Seed: HIHIFSFTGEEMATK
HIHYFSVTVEENATK

SEQ ID NO: 283277 - protein, 15 aa, Artificial Sequence
  Description of Artificial Sequence: Synthetic peptide
  Seed: HIHIFSFTGEEMATK
HIHYFSVTVEESATK

SEQ ID NO: 283278 - protein, 15 aa, Artificial Sequence
  Description of Artificial Sequence: Synthetic peptide
  Seed: HIHIFSFTGEEMATK
HIHYFSVTVEETATK

SEQ ID NO: 283279 - protein, 15 aa, Artificial Sequence
  Description of Artificial Sequence: Synthetic peptide
  Seed: HIHIFSFTGEEMATK
HIHYFSVTVEEVATK

SEQ ID NO: 283280 - protein, 15 aa, Artificial Sequence
  Description of Artificial Sequence: Synthetic peptide
  Seed: HIHIFSFTGEEMATK
HIHYFSVTWEEFATK

SEQ ID NO: 283281 - protein, 15 aa, Artificial Sequence
  Description of Artificial Sequence: Synthetic peptide
  Seed: HIHIFSFTGEEMATK
HIHYFSVTWEEIATK

SEQ ID NO: 283282 - protein, 15 aa, Artificial Sequence
  Description of Artificial Sequence: Synthetic peptide
  Seed: HIHIFSFTGEEMATK
HIHYFSVTWEELATK

SEQ ID NO: 283283 - protein, 15 aa, Artificial Sequence
  Description of Artificial Sequence: Synthetic peptide
  Seed: HIHIFSFTGEEMATK
HIHYFSVTWEEMATK

SEQ ID NO: 283284 - protein, 15 aa, Artificial Sequence
  Description of Artificial Sequence: Synthetic peptide
  Seed: HIHIFSFTGEEMATK
HIHYFSVTWEEVATK

SEQ ID NO: 283285 - protein, 15 aa, Artificial Sequence
  Description of Artificial Sequence: Synthetic peptide
  Seed: HIHIFSFTGEEMATK
HIHYFSVTYEEFATK

SEQ ID NO: 283286 - protein, 15 aa, Artificial Sequence
  Description of Artificial Sequence: Synthetic peptide
  Seed: HIHIFSFTGEEMATK
HIHYFSVTYEEIATK

SEQ ID NO: 283287 - protein, 15 aa, Artificial Sequence
  Description of Artificial Sequence: Synthetic peptide
  Seed: HIHIFSFTGEEMATK
HIHYFSVTYEELATK

SEQ ID NO: 283288 - protein, 15 aa, Artificial Sequence
  Description of Artificial Sequence: Synthetic peptide
  Seed: HIHIFSFTGEEMATK
HIHYFSVTYEEMATK

SEQ ID NO: 283289 - protein, 15 aa, Artificial Sequence
  Description of Artificial Sequence: Synthetic peptide
  Seed: HIHIFSFTGEEMATK
HIHYFSVTYEEVATK

SEQ ID NO: 283290 - protein, 15 aa, Artificial Sequence
  Description of Artificial Sequence: Synthetic peptide
  Seed: HIHIFSFTGEEMATK
HIHYFSVTYEEYATK

SEQ ID NO: 283291 - protein, 15 aa, Artificial Sequence
  Description of Artificial Sequence: Synthetic peptide
  Seed: HIHIFSFTGEEMATK
HIHYFSWTFEEFATK

SEQ ID NO: 283292 - protein, 15 aa, Artificial Sequence
  Description of Artificial Sequence: Synthetic peptide
  Seed: HIHIFSFTGEEMATK
HIHYFSWTFEEIATK

SEQ ID NO: 283293 - protein, 15 aa, Artificial Sequence
  Description of Artificial Sequence: Synthetic peptide
  Seed: HIHIFSFTGEEMATK
HIHYFSWTFEELATK

SEQ ID NO: 283294 - protein, 15 aa, Artificial Sequence
  Description of Artificial Sequence: Synthetic peptide
  Seed: HIHIFSFTGEEMATK
HIHYFSWTFEEMATK

SEQ ID NO: 283295 - protein, 15 aa, Artificial Sequence
  Description of Artificial Sequence: Synthetic peptide
  Seed: HIHIFSFTGEEMATK
HIHYFSWTFEEVATK

SEQ ID NO: 283296 - protein, 15 aa, Artificial Sequence
  Description of Artificial Sequence: Synthetic peptide
  Seed: HIHIFSFTGEEMATK
HIHYFSWTFEEYATK

SEQ ID NO: 283297 - protein, 15 aa, Artificial Sequence
  Description of Artificial Sequence: Synthetic peptide
  Seed: HIHIFSFTGEEMATK
HIHYFSWTIEEFATK

SEQ ID NO: 283298 - protein, 15 aa, Artificial Sequence
  Description of Artificial Sequence: Synthetic peptide
  Seed: HIHIFSFTGEEMATK
HIHYFSWTIEEIATK

SEQ ID NO: 283299 - protein, 15 aa, Artificial Sequence
  Description of Artificial Sequence: Synthetic peptide
  Seed: HIHIFSFTGEEMATK
HIHYFSWTIEELATK

SEQ ID NO: 283300 - protein, 15 aa, Artificial Sequence
  Description of Artificial Sequence: Synthetic peptide
  Seed: HIHIFSFTGEEMATK
HIHYFSWTLEEFATK

SEQ ID NO: 283301 - protein, 15 aa, Artificial Sequence
  Description of Artificial Sequence: Synthetic peptide
  Seed: HIHIFSFTGEEMATK
HIHYFSWTLEEIATK

SEQ ID NO: 283302 - protein, 15 aa, Artificial Sequence
  Description of Artificial Sequence: Synthetic peptide
  Seed: HIHIFSFTGEEMATK
HIHYFSWTLEELATK

SEQ ID NO: 283303 - protein, 15 aa, Artificial Sequence
  Description of Artificial Sequence: Synthetic peptide
  Seed: HIHIFSFTGEEMATK
HIHYFSWTLEEMATK

SEQ ID NO: 283304 - protein, 15 aa, Artificial Sequence
  Description of Artificial Sequence: Synthetic peptide
  Seed: HIHIFSFTGEEMATK
HIHYFSWTLEEVATK

SEQ ID NO: 283305 - protein, 15 aa, Artificial Sequence
  Description of Artificial Sequence: Synthetic peptide
  Seed: HIHIFSFTGEEMATK
HIHYFSWTMEEFATK

SEQ ID NO: 283306 - protein, 15 aa, Artificial Sequence
  Description of Artificial Sequence: Synthetic peptide
  Seed: HIHIFSFTGEEMATK
HIHYFSWTMEEIATK

SEQ ID NO: 283307 - protein, 15 aa, Artificial Sequence
  Description of Artificial Sequence: Synthetic peptide
  Seed: HIHIFSFTGEEMATK
HIHYFSWTMEELATK

SEQ ID NO: 283308 - protein, 15 aa, Artificial Sequence
  Description of Artificial Sequence: Synthetic peptide
  Seed: HIHIFSFTGEEMATK
HIHYFSWTWEEFATK

SEQ ID NO: 283309 - protein, 15 aa, Artificial Sequence
  Description of Artificial Sequence: Synthetic peptide
  Seed: HIHIFSFTGEEMATK
HIHYFSWTWEELATK

SEQ ID NO: 283310 - protein, 15 aa, Artificial Sequence
  Description of Artificial Sequence: Synthetic peptide
  Seed: HIHIFSFTGEEMATK
HIHYFSWTYEEFATK

SEQ ID NO: 283311 - protein, 15 aa, Artificial Sequence
  Description of Artificial Sequence: Synthetic peptide
  Seed: HIHIFSFTGEEMATK
HIHYFSWTYEEIATK

SEQ ID NO: 283312 - protein, 15 aa, Artificial Sequence
  Description of Artificial Sequence: Synthetic peptide
  Seed: HIHIFSFTGEEMATK
HIHYFSWTYEELATK

SEQ ID NO: 283313 - protein, 15 aa, Artificial Sequence
  Description of Artificial Sequence: Synthetic peptide
  Seed: HIHIFSFTGEEMATK
HIHYFSWTYEEVATK

SEQ ID NO: 283314 - protein, 15 aa, Artificial Sequence
  Description of Artificial Sequence: Synthetic peptide
  Seed: HIHIFSFTGEEMATK
HIHYFSYTFEEAATK

SEQ ID NO: 283315 - protein, 15 aa, Artificial Sequence
  Description of Artificial Sequence: Synthetic peptide
  Seed: HIHIFSFTGEEMATK
HIHYFSYTFEEFATK

SEQ ID NO: 283316 - protein, 15 aa, Artificial Sequence
  Description of Artificial Sequence: Synthetic peptide
  Seed: HIHIFSFTGEEMATK
HIHYFSYTFEEIATK

SEQ ID NO: 283317 - protein, 15 aa, Artificial Sequence
  Description of Artificial Sequence: Synthetic peptide
  Seed: HIHIFSFTGEEMATK
HIHYFSYTFEELATK

SEQ ID NO: 283318 - protein, 15 aa, Artificial Sequence
  Description of Artificial Sequence: Synthetic peptide
  Seed: HIHIFSFTGEEMATK
HIHYFSYTFEEMATK

SEQ ID NO: 283319 - protein, 15 aa, Artificial Sequence
  Description of Artificial Sequence: Synthetic peptide
  Seed: HIHIFSFTGEEMATK
HIHYFSYTFEESATK

SEQ ID NO: 283320 - protein, 15 aa, Artificial Sequence
  Description of Artificial Sequence: Synthetic peptide
  Seed: HIHIFSFTGEEMATK
HIHYFSYTFEETATK

SEQ ID NO: 283321 - protein, 15 aa, Artificial Sequence
  Description of Artificial Sequence: Synthetic peptide
  Seed: HIHIFSFTGEEMATK
HIHYFSYTFEEVATK

SEQ ID NO: 283322 - protein, 15 aa, Artificial Sequence
  Description of Artificial Sequence: Synthetic peptide
  Seed: HIHIFSFTGEEMATK
HIHYFSYTFEEYATK

SEQ ID NO: 283323 - protein, 15 aa, Artificial Sequence
  Description of Artificial Sequence: Synthetic peptide
  Seed: HIHIFSFTGEEMATK
HIHYFSYTIEEIATK

SEQ ID NO: 283324 - protein, 15 aa, Artificial Sequence
  Description of Artificial Sequence: Synthetic peptide
  Seed: HIHIFSFTGEEMATK
HIHYFSYTIEELATK

SEQ ID NO: 283325 - protein, 15 aa, Artificial Sequence
  Description of Artificial Sequence: Synthetic peptide
  Seed: HIHIFSFTGEEMATK
HIHYFSYTLEEFATK

SEQ ID NO: 283326 - protein, 15 aa, Artificial Sequence
  Description of Artificial Sequence: Synthetic peptide
  Seed: HIHIFSFTGEEMATK
HIHYFSYTLEEIATK

SEQ ID NO: 283327 - protein, 15 aa, Artificial Sequence
  Description of Artificial Sequence: Synthetic peptide
  Seed: HIHIFSFTGEEMATK
HIHYFSYTLEELATK

SEQ ID NO: 283328 - protein, 15 aa, Artificial Sequence
  Description of Artificial Sequence: Synthetic peptide
  Seed: HIHIFSFTGEEMATK
HIHYFSYTLEEMATK

SEQ ID NO: 283329 - protein, 15 aa, Artificial Sequence
  Description of Artificial Sequence: Synthetic peptide
  Seed: HIHIFSFTGEEMATK
HIHYFSYTLEEVATK

SEQ ID NO: 283330 - protein, 15 aa, Artificial Sequence
  Description of Artificial Sequence: Synthetic peptide
  Seed: HIHIFSFTGEEMATK
HIHYFSYTMEEIATK

SEQ ID NO: 283331 - protein, 15 aa, Artificial Sequence
  Description of Artificial Sequence: Synthetic peptide
  Seed: HIHIFSFTGEEMATK
HIHYFSYTMEELATK

SEQ ID NO: 283332 - protein, 15 aa, Artificial Sequence
  Description of Artificial Sequence: Synthetic peptide
  Seed: HIHIFSFTGEEMATK
HIHYFSYTMEEVATK

SEQ ID NO: 283333 - protein, 15 aa, Artificial Sequence
  Description of Artificial Sequence: Synthetic peptide
  Seed: HIHIFSFTGEEMATK
HIHYFSYTWEEFATK

SEQ ID NO: 283334 - protein, 15 aa, Artificial Sequence
  Description of Artificial Sequence: Synthetic peptide
  Seed: HIHIFSFTGEEMATK
HIHYFSYTWEEIATK

SEQ ID NO: 283335 - protein, 15 aa, Artificial Sequence
  Description of Artificial Sequence: Synthetic peptide
  Seed: HIHIFSFTGEEMATK
HIHYFSYTWEELATK

SEQ ID NO: 283336 - protein, 15 aa, Artificial Sequence
  Description of Artificial Sequence: Synthetic peptide
  Seed: HIHIFSFTGEEMATK
HIHYFSYTWEEVATK

SEQ ID NO: 283337 - protein, 15 aa, Artificial Sequence
  Description of Artificial Sequence: Synthetic peptide
  Seed: HIHIFSFTGEEMATK
HIHYFSYTYEEFATK

SEQ ID NO: 283338 - protein, 15 aa, Artificial Sequence
  Description of Artificial Sequence: Synthetic peptide
  Seed: HIHIFSFTGEEMATK
HIHYFSYTYEEIATK

SEQ ID NO: 283339 - protein, 15 aa, Artificial Sequence
  Description of Artificial Sequence: Synthetic peptide
  Seed: HIHIFSFTGEEMATK
HIHYFSYTYEELATK

SEQ ID NO: 283340 - protein, 15 aa, Artificial Sequence
  Description of Artificial Sequence: Synthetic peptide
  Seed: HIHIFSFTGEEMATK
HIHYFSYTYEEVATK

SEQ ID NO: 283341 - protein, 15 aa, Artificial Sequence
  Description of Artificial Sequence: Synthetic peptide
  Seed: HIHIFSFTGEEMATK
HIHHFSFTYEEFATK

SEQ ID NO: 283342 - protein, 15 aa, Artificial Sequence
  Description of Artificial Sequence: Synthetic peptide
  Seed: HIHIFSFTGEEMATK
HIHAFSLTYEEFATK

SEQ ID NO: 283343 - protein, 15 aa, Artificial Sequence
  Description of Artificial Sequence: Synthetic peptide
  Seed: HIHIFSFTGEEMATK
HIHYFSMTQEEPATK

SEQ ID NO: 283344 - protein, 15 aa, Artificial Sequence
  Description of Artificial Sequence: Synthetic peptide
  Seed: HIHIFSFTGEEMATK
HIHQFSLTYEEFATK

SEQ ID NO: 283345 - protein, 15 aa, Artificial Sequence
  Description of Artificial Sequence: Synthetic peptide
  Seed: HIHIFSFTGEEMATK
HIHKFSFTFEEFATK

SEQ ID NO: 283346 - protein, 15 aa, Artificial Sequence
  Description of Artificial Sequence: Synthetic peptide
  Seed: HIHIFSFTGEEMATK
HIHSFSLTFEEFATK

SEQ ID NO: 283347 - protein, 15 aa, Artificial Sequence
  Description of Artificial Sequence: Synthetic peptide
  Seed: HIHIFSFTGEEMATK
HIHFFSPTFEEYATK

SEQ ID NO: 283348 - protein, 15 aa, Artificial Sequence
  Description of Artificial Sequence: Synthetic peptide
  Seed: HIHIFSFTGEEMATK
HIHLFSSTFEERATK

SEQ ID NO: 283349 - protein, 15 aa, Artificial Sequence
  Description of Artificial Sequence: Synthetic peptide
  Seed: HIHIFSFTGEEMATK
HIHYFSATFEERATK

SEQ ID NO: 283350 - protein, 15 aa, Artificial Sequence
  Description of Artificial Sequence: Synthetic peptide
  Seed: HIHIFSFTGEEMATK
HIHYFSSTFEEHATK

SEQ ID NO: 283351 - protein, 15 aa, Artificial Sequence
  Description of Artificial Sequence: Synthetic peptide
  Seed: HIHIFSFTGEEMATK
HIHLFSSTFEEKATK

SEQ ID NO: 283352 - protein, 15 aa, Artificial Sequence
  Description of Artificial Sequence: Synthetic peptide
  Seed: HIHIFSFTGEEMATK
HIHRFSFTFEEYATK

SEQ ID NO: 283353 - protein, 15 aa, Artificial Sequence
  Description of Artificial Sequence: Synthetic peptide
  Seed: HIHIFSFTGEEMATK
HIHYFSTTFEEKATK

SEQ ID NO: 283354 - protein, 15 aa, Artificial Sequence
  Description of Artificial Sequence: Synthetic peptide
  Seed: HIHIFSFTGEEMATK
HIHYFSSTFEEPATK

SEQ ID NO: 283355 - protein, 15 aa, Artificial Sequence
  Description of Artificial Sequence: Synthetic peptide
  Seed: HIHIFSFTGEEMATK
HIHFFSATYEENATK

SEQ ID NO: 283356 - protein, 15 aa, Artificial Sequence
  Description of Artificial Sequence: Synthetic peptide
  Seed: HIHIFSFTGEEMATK
HIHKFSATFEELATK

SEQ ID NO: 283357 - protein, 15 aa, Artificial Sequence
  Description of Artificial Sequence: Synthetic peptide
  Seed: HIHIFSFTGEEMATK
HIHCFSSTFEEMATK

SEQ ID NO: 283358 - protein, 15 aa, Artificial Sequence
  Description of Artificial Sequence: Synthetic peptide
  Seed: HIHIFSFTGEEMATK
HIHFFSPTYEELATK

SEQ ID NO: 283359 - protein, 15 aa, Artificial Sequence
  Description of Artificial Sequence: Synthetic peptide
  Seed: HIHIFSFTGEEMATK
HIHIFSPTFEEVATK

SEQ ID NO: 283360 - protein, 15 aa, Artificial Sequence
  Description of Artificial Sequence: Synthetic peptide
  Seed: HIHIFSFTGEEMATK
HIHTFSLTFEEFATK

SEQ ID NO: 283361 - protein, 15 aa, Artificial Sequence
  Description of Artificial Sequence: Synthetic peptide
  Seed: HIHIFSFTGEEMATK
HIHRFSFTYEEFATK

SEQ ID NO: 283362 - protein, 15 aa, Artificial Sequence
  Description of Artificial Sequence: Synthetic peptide
  Seed: HIHIFSFTGEEMATK
HIHKFSVTFEEFATK

SEQ ID NO: 283363 - protein, 15 aa, Artificial Sequence
  Description of Artificial Sequence: Synthetic peptide
  Seed: HIHIFSFTGEEMATK
HIHRFSTTFEEVATK

SEQ ID NO: 283364 - protein, 15 aa, Artificial Sequence
  Description of Artificial Sequence: Synthetic peptide
  Seed: HIHIFSFTGEEMATK
HIHYFSATFEEPATK

SEQ ID NO: 283365 - protein, 15 aa, Artificial Sequence
  Description of Artificial Sequence: Synthetic peptide
  Seed: HIHIFSFTGEEMATK
HIHLFSATFEEKATK

SEQ ID NO: 283366 - protein, 15 aa, Artificial Sequence
  Description of Artificial Sequence: Synthetic peptide
  Seed: HIHIFSFTGEEMATK
HIHRFSATFEELATK

SEQ ID NO: 283367 - protein, 15 aa, Artificial Sequence
  Description of Artificial Sequence: Synthetic peptide
  Seed: HIHIFSFTGEEMATK
HIHKFSMTFEELATK

SEQ ID NO: 283368 - protein, 15 aa, Artificial Sequence
  Description of Artificial Sequence: Synthetic peptide
  Seed: HIHIFSFTGEEMATK
HIHFFSTTWEEPATK

SEQ ID NO: 283369 - protein, 15 aa, Artificial Sequence
  Description of Artificial Sequence: Synthetic peptide
  Seed: HIHIFSFTGEEMATK
HIHFFSGTYEEFATK

SEQ ID NO: 283370 - protein, 15 aa, Artificial Sequence
  Description of Artificial Sequence: Synthetic peptide
  Seed: HIHIFSFTGEEMATK
HIHKFSMTFEEFATK

SEQ ID NO: 283371 - protein, 15 aa, Artificial Sequence
  Description of Artificial Sequence: Synthetic peptide
  Seed: HIHIFSFTGEEMATK
HIHRFSITFEEMATK

SEQ ID NO: 283372 - protein, 15 aa, Artificial Sequence
  Description of Artificial Sequence: Synthetic peptide
  Seed: HIHIFSFTGEEMATK
HIHAFSSTFEELATK

SEQ ID NO: 283373 - protein, 15 aa, Artificial Sequence
  Description of Artificial Sequence: Synthetic peptide
  Seed: HIHIFSFTGEEMATK
HIHYFSSTFEERATK

SEQ ID NO: 283374 - protein, 15 aa, Artificial Sequence
  Description of Artificial Sequence: Synthetic peptide
  Seed: HIHIFSFTGEEMATK
HIHLFSPTFEEVATK

SEQ ID NO: 283375 - protein, 15 aa, Artificial Sequence
  Description of Artificial Sequence: Synthetic peptide
  Seed: HIHIFSFTGEEMATK
HIHWFSTTFEEKATK

SEQ ID NO: 283376 - protein, 15 aa, Artificial Sequence
  Description of Artificial Sequence: Synthetic peptide
  Seed: HIHIFSFTGEEMATK
HIHFFSTTYEEHATK

SEQ ID NO: 283377 - protein, 15 aa, Artificial Sequence
  Description of Artificial Sequence: Synthetic peptide
  Seed: HIHIFSFTGEEMATK
HIHFFSTTWEEHATK

SEQ ID NO: 283378 - protein, 15 aa, Artificial Sequence
  Description of Artificial Sequence: Synthetic peptide
  Seed: HIHIFSFTGEEMATK
HIHHFSSTFEELATK

SEQ ID NO: 283379 - protein, 15 aa, Artificial Sequence
  Description of Artificial Sequence: Synthetic peptide
  Seed: HIHIFSFTGEEMATK
HIHKFSATFEEIATK

SEQ ID NO: 283380 - protein, 15 aa, Artificial Sequence
  Description of Artificial Sequence: Synthetic peptide
  Seed: HIHIFSFTGEEMATK
HIHFFSATWEESATK

SEQ ID NO: 283381 - protein, 15 aa, Artificial Sequence
  Description of Artificial Sequence: Synthetic peptide
  Seed: HIHIFSFTGEEMATK
HIHRFSSTFEEFATK

SEQ ID NO: 283382 - protein, 15 aa, Artificial Sequence
  Description of Artificial Sequence: Synthetic peptide
  Seed: HIHIFSFTGEEMATK
HIHFFSPTYEEIATK

SEQ ID NO: 283383 - protein, 15 aa, Artificial Sequence
  Description of Artificial Sequence: Synthetic peptide
  Seed: HIHIFSFTGEEMATK
HIHYFSSTFEEKATK

SEQ ID NO: 283384 - protein, 15 aa, Artificial Sequence
  Description of Artificial Sequence: Synthetic peptide
  Seed: HIHIFSFTGEEMATK
HIHRFSSTFEEVATK

SEQ ID NO: 283385 - protein, 15 aa, Artificial Sequence
  Description of Artificial Sequence: Synthetic peptide
  Seed: HIHIFSFTGEEMATK
HIHFFSITYEEKATK

SEQ ID NO: 283386 - protein, 15 aa, Artificial Sequence
  Description of Artificial Sequence: Synthetic peptide
  Seed: HIHIFSFTGEEMATK
HIHMFSGTFEELATK

SEQ ID NO: 283387 - protein, 15 aa, Artificial Sequence
  Description of Artificial Sequence: Synthetic peptide
  Seed: HIHIFSFTGEEMATK
HIHFFSETFEEKATK

SEQ ID NO: 283388 - protein, 15 aa, Artificial Sequence
  Description of Artificial Sequence: Synthetic peptide
  Seed: HIHIFSFTGEEMATK
HIHRFSATFEEIATK

SEQ ID NO: 283389 - protein, 15 aa, Artificial Sequence
  Description of Artificial Sequence: Synthetic peptide
  Seed: HIHIFSFTGEEMATK
HIHMFSATWEELATK

SEQ ID NO: 283390 - protein, 15 aa, Artificial Sequence
  Description of Artificial Sequence: Synthetic peptide
  Seed: HIHIFSFTGEEMATK
HIHSFSITFEEFATK

SEQ ID NO: 283391 - protein, 15 aa, Artificial Sequence
  Description of Artificial Sequence: Synthetic peptide
  Seed: HIHIFSFTGEEMATK
HIHFFSQTFEEKATK

SEQ ID NO: 283392 - protein, 15 aa, Artificial Sequence
  Description of Artificial Sequence: Synthetic peptide
  Seed: HIHIFSFTGEEMATK
HIHFFSNTFEEHATK

SEQ ID NO: 283393 - protein, 15 aa, Artificial Sequence
  Description of Artificial Sequence: Synthetic peptide
  Seed: HIHIFSFTGEEMATK
HIHRFSTTFEEFATK

SEQ ID NO: 283394 - protein, 15 aa, Artificial Sequence
  Description of Artificial Sequence: Synthetic peptide
  Seed: HIHIFSFTGEEMATK
HIHMFSTTFEEHATK

SEQ ID NO: 283395 - protein, 15 aa, Artificial Sequence
  Description of Artificial Sequence: Synthetic peptide
  Seed: HIHIFSFTGEEMATK
HIHFFSATWEENATK

SEQ ID NO: 283396 - protein, 15 aa, Artificial Sequence
  Description of Artificial Sequence: Synthetic peptide
  Seed: HIHIFSFTGEEMATK
HIHIFSSTFEERATK

SEQ ID NO: 283397 - protein, 15 aa, Artificial Sequence
  Description of Artificial Sequence: Synthetic peptide
  Seed: HIHIFSFTGEEMATK
HIHLFSPTFEEFATK

SEQ ID NO: 283398 - protein, 15 aa, Artificial Sequence
  Description of Artificial Sequence: Synthetic peptide
  Seed: HIHIFSFTGEEMATK
HIHKFSATFEEVATK

SEQ ID NO: 283399 - protein, 15 aa, Artificial Sequence
  Description of Artificial Sequence: Synthetic peptide
  Seed: HIHIFSFTGEEMATK
HIHFFSFTYEEKATK

SEQ ID NO: 283400 - protein, 15 aa, Artificial Sequence
  Description of Artificial Sequence: Synthetic peptide
  Seed: HIHIFSFTGEEMATK
HIHFFSITWEEKATK

SEQ ID NO: 283401 - protein, 15 aa, Artificial Sequence
  Description of Artificial Sequence: Synthetic peptide
  Seed: HIHIFSFTGEEMATK
HIHHFSATFEELATK

SEQ ID NO: 283402 - protein, 15 aa, Artificial Sequence
  Description of Artificial Sequence: Synthetic peptide
  Seed: HIHIFSFTGEEMATK
HIHFFSTTYEERATK

SEQ ID NO: 283403 - protein, 15 aa, Artificial Sequence
  Description of Artificial Sequence: Synthetic peptide
  Seed: HIHIFSFTGEEMATK
HIHWFSTTFEEPATK

SEQ ID NO: 283404 - protein, 15 aa, Artificial Sequence
  Description of Artificial Sequence: Synthetic peptide
  Seed: HIHIFSFTGEEMATK
HIHYFSATFEEKATK

SEQ ID NO: 283405 - protein, 15 aa, Artificial Sequence
  Description of Artificial Sequence: Synthetic peptide
  Seed: HIHIFSFTGEEMATK
HIHRFSATFEEVATK

SEQ ID NO: 283406 - protein, 15 aa, Artificial Sequence
  Description of Artificial Sequence: Synthetic peptide
  Seed: HIHIFSFTGEEMATK
HIHWFSTTFEERATK

SEQ ID NO: 283407 - protein, 15 aa, Artificial Sequence
  Description of Artificial Sequence: Synthetic peptide
  Seed: HIHIFSFTGEEMATK
HIHRFSVTFEEMATK

SEQ ID NO: 283408 - protein, 15 aa, Artificial Sequence
  Description of Artificial Sequence: Synthetic peptide
  Seed: HIHIFSFTGEEMATK
HIHFFSPTWEELATK

SEQ ID NO: 283409 - protein, 15 aa, Artificial Sequence
  Description of Artificial Sequence: Synthetic peptide
  Seed: HIHIFSFTGEEMATK
HIHRFSATFEEFATK

SEQ ID NO: 283410 - protein, 15 aa, Artificial Sequence
  Description of Artificial Sequence: Synthetic peptide
  Seed: HIHIFSFTGEEMATK
HIHWFSSTFEERATK

SEQ ID NO: 283411 - protein, 15 aa, Artificial Sequence
  Description of Artificial Sequence: Synthetic peptide
  Seed: HIHIFSFTGEEMATK
HIHYFSPTFEEVATK

SEQ ID NO: 283412 - protein, 15 aa, Artificial Sequence
  Description of Artificial Sequence: Synthetic peptide
  Seed: HIHIFSFTGEEMATK
HIHFFSTTLEEPATK

SEQ ID NO: 283413 - protein, 15 aa, Artificial Sequence
  Description of Artificial Sequence: Synthetic peptide
  Seed: HIHIFSFTGEEMATK
HIHRFSLTLEEFATK

SEQ ID NO: 283414 - protein, 15 aa, Artificial Sequence
  Description of Artificial Sequence: Synthetic peptide
  Seed: HIHIFSFTGEEMATK
HIHKFSSTFEEVATK

SEQ ID NO: 283415 - protein, 15 aa, Artificial Sequence
  Description of Artificial Sequence: Synthetic peptide
  Seed: HIHIFSFTGEEMATK
HIHKFSTTFEEFATK

SEQ ID NO: 283416 - protein, 15 aa, Artificial Sequence
  Description of Artificial Sequence: Synthetic peptide
  Seed: HIHIFSFTGEEMATK
HIHFFSPTLEEIATK

SEQ ID NO: 283417 - protein, 15 aa, Artificial Sequence
  Description of Artificial Sequence: Synthetic peptide
  Seed: HIHIFSFTGEEMATK
HIHMFSITFEEKATK

SEQ ID NO: 283418 - protein, 15 aa, Artificial Sequence
  Description of Artificial Sequence: Synthetic peptide
  Seed: HIHIFSFTGEEMATK
HIHFFSTTLEEHATK

SEQ ID NO: 283419 - protein, 15 aa, Artificial Sequence
  Description of Artificial Sequence: Synthetic peptide
  Seed: HIHIFSFTGEEMATK
HIHMFSVTFEERATK

SEQ ID NO: 283420 - protein, 15 aa, Artificial Sequence
  Description of Artificial Sequence: Synthetic peptide
  Seed: HIHIFSFTGEEMATK
HIHRFSFTLEEFATK

SEQ ID NO: 283421 - protein, 15 aa, Artificial Sequence
  Description of Artificial Sequence: Synthetic peptide
  Seed: HIHIFSFTGEEMATK
HIHIFSATFEEKATK

SEQ ID NO: 283422 - protein, 15 aa, Artificial Sequence
  Description of Artificial Sequence: Synthetic peptide
  Seed: HIHIFSFTGEEMATK
HIHFFSPTFEEAATK

SEQ ID NO: 283423 - protein, 15 aa, Artificial Sequence
  Description of Artificial Sequence: Synthetic peptide
  Seed: HIHIFSFTGEEMATK
HIHKFSFTFEEMATK

SEQ ID NO: 283424 - protein, 15 aa, Artificial Sequence
  Description of Artificial Sequence: Synthetic peptide
  Seed: HIHIFSFTGEEMATK
HIHRFSITLEEFATK

SEQ ID NO: 283425 - protein, 15 aa, Artificial Sequence
  Description of Artificial Sequence: Synthetic peptide
  Seed: HIHIFSFTGEEMATK
HIHMFSTTFEERATK

SEQ ID NO: 283426 - protein, 15 aa, Artificial Sequence
  Description of Artificial Sequence: Synthetic peptide
  Seed: HIHIFSFTGEEMATK
HIHFFSSTLEERATK

SEQ ID NO: 283427 - protein, 15 aa, Artificial Sequence
  Description of Artificial Sequence: Synthetic peptide
  Seed: HIHIFSFTGEEMATK
HIHFFSSTMEETATK

SEQ ID NO: 283428 - protein, 15 aa, Artificial Sequence
  Description of Artificial Sequence: Synthetic peptide
  Seed: HIHIFSFTGEEMATK
HIHSFSMTFEEFATK

SEQ ID NO: 283429 - protein, 15 aa, Artificial Sequence
  Description of Artificial Sequence: Synthetic peptide
  Seed: HIHIFSFTGEEMATK
HIHFFSSTLEENATK

SEQ ID NO: 283430 - protein, 15 aa, Artificial Sequence
  Description of Artificial Sequence: Synthetic peptide
  Seed: HIHIFSFTGEEMATK
HIHFFSSTYEEPATK

SEQ ID NO: 283431 - protein, 15 aa, Artificial Sequence
  Description of Artificial Sequence: Synthetic peptide
  Seed: HIHIFSFTGEEMATK
HIHHFSTTFEEIATK

SEQ ID NO: 283432 - protein, 15 aa, Artificial Sequence
  Description of Artificial Sequence: Synthetic peptide
  Seed: HIHIFSFTGEEMATK
HIHFFSSTYEEQATK

SEQ ID NO: 283433 - protein, 15 aa, Artificial Sequence
  Description of Artificial Sequence: Synthetic peptide
  Seed: HIHIFSFTGEEMATK
HIHWFSPTFEELATK

SEQ ID NO: 283434 - protein, 15 aa, Artificial Sequence
  Description of Artificial Sequence: Synthetic peptide
  Seed: HIHIFSFTGEEMATK
HIHFFSTTWEERATK

SEQ ID NO: 283435 - protein, 15 aa, Artificial Sequence
  Description of Artificial Sequence: Synthetic peptide
  Seed: HIHIFSFTGEEMATK
HIHNFSITFEEFATK

SEQ ID NO: 283436 - protein, 15 aa, Artificial Sequence
  Description of Artificial Sequence: Synthetic peptide
  Seed: HIHIFSFTGEEMATK
HIHMFSGTFEEIATK

SEQ ID NO: 283437 - protein, 15 aa, Artificial Sequence
  Description of Artificial Sequence: Synthetic peptide
  Seed: HIHIFSFTGEEMATK
HIHLFSSTWEEYATK

SEQ ID NO: 283438 - protein, 15 aa, Artificial Sequence
  Description of Artificial Sequence: Synthetic peptide
  Seed: HIHIFSFTGEEMATK
HIHRFSLTYEEFATK

SEQ ID NO: 283439 - protein, 15 aa, Artificial Sequence
  Description of Artificial Sequence: Synthetic peptide
  Seed: HIHIFSFTGEEMATK
HIHKFSSTFEEFATK

SEQ ID NO: 283440 - protein, 15 aa, Artificial Sequence
  Description of Artificial Sequence: Synthetic peptide
  Seed: HIHIFSFTGEEMATK
HIHFFSSTWEEHATK

SEQ ID NO: 283441 - protein, 15 aa, Artificial Sequence
  Description of Artificial Sequence: Synthetic peptide
  Seed: HIHIFSFTGEEMATK
HIHMFSFTFEEKATK

SEQ ID NO: 283442 - protein, 15 aa, Artificial Sequence
  Description of Artificial Sequence: Synthetic peptide
  Seed: HIHIFSFTGEEMATK
HIHFFSWTFEEKATK

SEQ ID NO: 283443 - protein, 15 aa, Artificial Sequence
  Description of Artificial Sequence: Synthetic peptide
  Seed: HIHIFSFTGEEMATK
HIHCFSFTWEELATK

SEQ ID NO: 283444 - protein, 15 aa, Artificial Sequence
  Description of Artificial Sequence: Synthetic peptide
  Seed: HIHIFSFTGEEMATK
HIHFFSRTFEEHATK

SEQ ID NO: 283445 - protein, 15 aa, Artificial Sequence
  Description of Artificial Sequence: Synthetic peptide
  Seed: HIHIFSFTGEEMATK
HIHMFSVTFEEKATK

SEQ ID NO: 283446 - protein, 15 aa, Artificial Sequence
  Description of Artificial Sequence: Synthetic peptide
  Seed: HIHIFSFTGEEMATK
HIHFFSATYEEPATK

SEQ ID NO: 283447 - protein, 15 aa, Artificial Sequence
  Description of Artificial Sequence: Synthetic peptide
  Seed: HIHIFSFTGEEMATK
HIHRFSHTFEELATK

SEQ ID NO: 283448 - protein, 15 aa, Artificial Sequence
  Description of Artificial Sequence: Synthetic peptide
  Seed: HIHIFSFTGEEMATK
HIHFFSGTFEEHATK

SEQ ID NO: 283449 - protein, 15 aa, Artificial Sequence
  Description of Artificial Sequence: Synthetic peptide
  Seed: HIHIFSFTGEEMATK
HIHWFSLTFEEKATK

SEQ ID NO: 283450 - protein, 15 aa, Artificial Sequence
  Description of Artificial Sequence: Synthetic peptide
  Seed: HIHIFSFTGEEMATK
HIHAFSVTYEEFATK

SEQ ID NO: 283451 - protein, 15 aa, Artificial Sequence
  Description of Artificial Sequence: Synthetic peptide
  Seed: HIHIFSFTGEEMATK
HIHFFSSTWEERATK

SEQ ID NO: 283452 - protein, 15 aa, Artificial Sequence
  Description of Artificial Sequence: Synthetic peptide
  Seed: HIHIFSFTGEEMATK
HIHKFSLTFEEMATK

SEQ ID NO: 283453 - protein, 15 aa, Artificial Sequence
  Description of Artificial Sequence: Synthetic peptide
  Seed: HIHIFSFTGEEMATK
HIHRFSTTFEEMATK

SEQ ID NO: 283454 - protein, 15 aa, Artificial Sequence
  Description of Artificial Sequence: Synthetic peptide
  Seed: HIHIFSFTGEEMATK
HIHFFSSTLEEHATK

SEQ ID NO: 283455 - protein, 15 aa, Artificial Sequence
  Description of Artificial Sequence: Synthetic peptide
  Seed: HIHIFSFTGEEMATK
HIHFFSPTFEETATK

SEQ ID NO: 283456 - protein, 15 aa, Artificial Sequence
  Description of Artificial Sequence: Synthetic peptide
  Seed: HIHIFSFTGEEMATK
HIHLFSHTFEERATK

SEQ ID NO: 283457 - protein, 15 aa, Artificial Sequence
  Description of Artificial Sequence: Synthetic peptide
  Seed: HIHIFSFTGEEMATK
HIHYFSSTMEEVATK

SEQ ID NO: 283458 - protein, 15 aa, Artificial Sequence
  Description of Artificial Sequence: Synthetic peptide
  Seed: HIHIFSFTGEEMATK
HIHSFSSTFEEIATK

SEQ ID NO: 283459 - protein, 15 aa, Artificial Sequence
  Description of Artificial Sequence: Synthetic peptide
  Seed: HIHIFSFTGEEMATK
HIHFFSTTIEESATK

SEQ ID NO: 283460 - protein, 15 aa, Artificial Sequence
  Description of Artificial Sequence: Synthetic peptide
  Seed: HIHIFSFTGEEMATK
HIHFFSATWEEEATK

SEQ ID NO: 283461 - protein, 15 aa, Artificial Sequence
  Description of Artificial Sequence: Synthetic peptide
  Seed: HIHIFSFTGEEMATK
HIHFFSWTWEEYATK

SEQ ID NO: 283462 - protein, 15 aa, Artificial Sequence
  Description of Artificial Sequence: Synthetic peptide
  Seed: HIHIFSFTGEEMATK
HIHRFSYTFEEVATK

SEQ ID NO: 283463 - protein, 15 aa, Artificial Sequence
  Description of Artificial Sequence: Synthetic peptide
  Seed: HIHIFSFTGEEMATK
HIHWFSSTFEEQATK

SEQ ID NO: 283464 - protein, 15 aa, Artificial Sequence
  Description of Artificial Sequence: Synthetic peptide
  Seed: HIHIFSFTGEEMATK
HIHFFSSTIEETATK

SEQ ID NO: 283465 - protein, 15 aa, Artificial Sequence
  Description of Artificial Sequence: Synthetic peptide
  Seed: HIHIFSFTGEEMATK
HIHHFSHTFEELATK

SEQ ID NO: 283466 - protein, 15 aa, Artificial Sequence
  Description of Artificial Sequence: Synthetic peptide
  Seed: HIHIFSFTGEEMATK
HIHFFSGTYEEMATK

SEQ ID NO: 283467 - protein, 15 aa, Artificial Sequence
  Description of Artificial Sequence: Synthetic peptide
  Seed: HIHIFSFTGEEMATK
HIHFFSNTFEEKATK

SEQ ID NO: 283468 - protein, 15 aa, Artificial Sequence
  Description of Artificial Sequence: Synthetic peptide
  Seed: HIHIFSFTGEEMATK
HIHFFSRTFEEPATK

SEQ ID NO: 283469 - protein, 15 aa, Artificial Sequence
  Description of Artificial Sequence: Synthetic peptide
  Seed: HIHIFSFTGEEMATK
HIHFFSKTFEERATK

SEQ ID NO: 283470 - protein, 15 aa, Artificial Sequence
  Description of Artificial Sequence: Synthetic peptide
  Seed: HIHIFSFTGEEMATK
HIHCFSITWEEFATK

SEQ ID NO: 283471 - protein, 15 aa, Artificial Sequence
  Description of Artificial Sequence: Synthetic peptide
  Seed: HIHIFSFTGEEMATK
HIHVFSSTFEENATK

SEQ ID NO: 283472 - protein, 15 aa, Artificial Sequence
  Description of Artificial Sequence: Synthetic peptide
  Seed: HIHIFSFTGEEMATK
HIHMFSRTFEEFATK

SEQ ID NO: 283473 - protein, 15 aa, Artificial Sequence
  Description of Artificial Sequence: Synthetic peptide
  Seed: HIHIFSFTGEEMATK
HIHMFSATWEEVATK

SEQ ID NO: 283474 - protein, 15 aa, Artificial Sequence
  Description of Artificial Sequence: Synthetic peptide
  Seed: HIHIFSFTGEEMATK
HIHFFSPTWEEIATK

SEQ ID NO: 283475 - protein, 15 aa, Artificial Sequence
  Description of Artificial Sequence: Synthetic peptide
  Seed: HIHIFSFTGEEMATK
HIHFFSTTMEESATK

SEQ ID NO: 283476 - protein, 15 aa, Artificial Sequence
  Description of Artificial Sequence: Synthetic peptide
  Seed: HIHIFSFTGEEMATK
HIHVFSATWEEVATK

SEQ ID NO: 283477 - protein, 15 aa, Artificial Sequence
  Description of Artificial Sequence: Synthetic peptide
  Seed: HIHIFSFTGEEMATK
HIHYFSYTFEERATK

SEQ ID NO: 283478 - protein, 15 aa, Artificial Sequence
  Description of Artificial Sequence: Synthetic peptide
  Seed: HIHIFSFTGEEMATK
HIHKFSITFEEYATK

SEQ ID NO: 283479 - protein, 15 aa, Artificial Sequence
  Description of Artificial Sequence: Synthetic peptide
  Seed: HIHIFSFTGEEMATK
HIHMFSGTFEEVATK

SEQ ID NO: 283480 - protein, 15 aa, Artificial Sequence
  Description of Artificial Sequence: Synthetic peptide
  Seed: HIHIFSFTGEEMATK
HIHFFSTTMEENATK

SEQ ID NO: 283481 - protein, 15 aa, Artificial Sequence
  Description of Artificial Sequence: Synthetic peptide
  Seed: HIHIFSFTGEEMATK
HIHFFSITIEERATK

SEQ ID NO: 283482 - protein, 15 aa, Artificial Sequence
  Description of Artificial Sequence: Synthetic peptide
  Seed: HIHIFSFTGEEMATK
HIHYFSATWEEMATK

SEQ ID NO: 283483 - protein, 15 aa, Artificial Sequence
  Description of Artificial Sequence: Synthetic peptide
  Seed: HIHIFSFTGEEMATK
HIHRFSLTMEEFATK

SEQ ID NO: 283484 - protein, 15 aa, Artificial Sequence
  Description of Artificial Sequence: Synthetic peptide
  Seed: HIHIFSFTGEEMATK
HIHFFSGTFEEEATK

SEQ ID NO: 283485 - protein, 15 aa, Artificial Sequence
  Description of Artificial Sequence: Synthetic peptide
  Seed: HIHIFSFTGEEMATK
HIHRFSMTFEEMATK

SEQ ID NO: 283486 - protein, 15 aa, Artificial Sequence
  Description of Artificial Sequence: Synthetic peptide
  Seed: HIHIFSFTGEEMATK
HIHFFSTTIEENATK

SEQ ID NO: 283487 - protein, 15 aa, Artificial Sequence
  Description of Artificial Sequence: Synthetic peptide
  Seed: HIHIFSFTGEEMATK
HIHLFSATYEETATK

SEQ ID NO: 283488 - protein, 15 aa, Artificial Sequence
  Description of Artificial Sequence: Synthetic peptide
  Seed: HIHIFSFTGEEMATK
HIHRFSLTLEELATK

SEQ ID NO: 283489 - protein, 15 aa, Artificial Sequence
  Description of Artificial Sequence: Synthetic peptide
  Seed: HIHIFSFTGEEMATK
HIHKFSSTFEEMATK

SEQ ID NO: 283490 - protein, 15 aa, Artificial Sequence
  Description of Artificial Sequence: Synthetic peptide
  Seed: HIHIFSFTGEEMATK
HIHRFSITIEEFATK

SEQ ID NO: 283491 - protein, 15 aa, Artificial Sequence
  Description of Artificial Sequence: Synthetic peptide
  Seed: HIHIFSFTGEEMATK
HIHVFSRTFEEFATK

SEQ ID NO: 283492 - protein, 15 aa, Artificial Sequence
  Description of Artificial Sequence: Synthetic peptide
  Seed: HIHIFSFTGEEMATK
HIHFFSPTWEEFATK

SEQ ID NO: 283493 - protein, 15 aa, Artificial Sequence
  Description of Artificial Sequence: Synthetic peptide
  Seed: HIHIFSFTGEEMATK
HIHFFSGTLEEVATK

SEQ ID NO: 283494 - protein, 15 aa, Artificial Sequence
  Description of Artificial Sequence: Synthetic peptide
  Seed: HIHIFSFTGEEMATK
HIHFFSFTNEEFATK

SEQ ID NO: 283495 - protein, 15 aa, Artificial Sequence
  Description of Artificial Sequence: Synthetic peptide
  Seed: HIHIFSFTGEEMATK
HIHFFSTTWEEQATK

SEQ ID NO: 283496 - protein, 15 aa, Artificial Sequence
  Description of Artificial Sequence: Synthetic peptide
  Seed: HIHIFSFTGEEMATK
HIHKFSLTYEELATK

SEQ ID NO: 283497 - protein, 15 aa, Artificial Sequence
  Description of Artificial Sequence: Synthetic peptide
  Seed: HIHIFSFTGEEMATK
HIHFFSLTMEEKATK

SEQ ID NO: 283498 - protein, 15 aa, Artificial Sequence
  Description of Artificial Sequence: Synthetic peptide
  Seed: HIHIFSFTGEEMATK
HIHYFSITWEETATK

SEQ ID NO: 283499 - protein, 15 aa, Artificial Sequence
  Description of Artificial Sequence: Synthetic peptide
  Seed: HIHIFSFTGEEMATK
HIHCFSFTFEETATK

SEQ ID NO: 283500 - protein, 15 aa, Artificial Sequence
  Description of Artificial Sequence: Synthetic peptide
  Seed: HIHIFSFTGEEMATK
HIHFFSVTIEEPATK

SEQ ID NO: 283501 - protein, 15 aa, Artificial Sequence
  Description of Artificial Sequence: Synthetic peptide
  Seed: HIHIFSFTGEEMATK
HIHCFSETFEEVATK

SEQ ID NO: 283502 - protein, 15 aa, Artificial Sequence
  Description of Artificial Sequence: Synthetic peptide
  Seed: HIHIFSFTGEEMATK
HIHYFSTTYEEYATK

SEQ ID NO: 283503 - protein, 15 aa, Artificial Sequence
  Description of Artificial Sequence: Synthetic peptide
  Seed: HIHIFSFTGEEMATK
HIHIFSLTAEEFATK

SEQ ID NO: 283504 - protein, 15 aa, Artificial Sequence
  Description of Artificial Sequence: Synthetic peptide
  Seed: HIHIFSFTGEEMATK
HIHRFSLTWEELATK

SEQ ID NO: 283505 - protein, 15 aa, Artificial Sequence
  Description of Artificial Sequence: Synthetic peptide
  Seed: HIHIFSFTGEEMATK
HIHIFSTTWEESATK

SEQ ID NO: 283506 - protein, 15 aa, Artificial Sequence
  Description of Artificial Sequence: Synthetic peptide
  Seed: HIHIFSFTGEEMATK
HIHWFSHTFEERATK

SEQ ID NO: 283507 - protein, 15 aa, Artificial Sequence
  Description of Artificial Sequence: Synthetic peptide
  Seed: HIHIFSFTGEEMATK
HIHLFSSTFEEGATK

SEQ ID NO: 283508 - protein, 15 aa, Artificial Sequence
  Description of Artificial Sequence: Synthetic peptide
  Seed: HIHIFSFTGEEMATK
HIHRFSETFEEIATK

SEQ ID NO: 283509 - protein, 15 aa, Artificial Sequence
  Description of Artificial Sequence: Synthetic peptide
  Seed: HIHIFSFTGEEMATK
HIHIFSITAEEFATK

SEQ ID NO: 283510 - protein, 15 aa, Artificial Sequence
  Description of Artificial Sequence: Synthetic peptide
  Seed: HIHIFSFTGEEMATK
HIHNFSSTFEELATK

SEQ ID NO: 283511 - protein, 15 aa, Artificial Sequence
  Description of Artificial Sequence: Synthetic peptide
  Seed: HIHIFSFTGEEMATK
HIHYFSTTYEETATK

SEQ ID NO: 283512 - protein, 15 aa, Artificial Sequence
  Description of Artificial Sequence: Synthetic peptide
  Seed: HIHIFSFTGEEMATK
HIHHFSSTFEEVATK

SEQ ID NO: 283513 - protein, 15 aa, Artificial Sequence
  Description of Artificial Sequence: Synthetic peptide
  Seed: HIHIFSFTGEEMATK
HIHLFSATIEEFATK

SEQ ID NO: 283514 - protein, 15 aa, Artificial Sequence
  Description of Artificial Sequence: Synthetic peptide
  Seed: HIHIFSFTGEEMATK
HIHVFSHTYEEFATK

SEQ ID NO: 283515 - protein, 15 aa, Artificial Sequence
  Description of Artificial Sequence: Synthetic peptide
  Seed: HIHIFSFTGEEMATK
HIHFFSFTIEEDATK

SEQ ID NO: 283516 - protein, 15 aa, Artificial Sequence
  Description of Artificial Sequence: Synthetic peptide
  Seed: HIHIFSFTGEEMATK
HIHLFSKTFEEYATK

SEQ ID NO: 283517 - protein, 15 aa, Artificial Sequence
  Description of Artificial Sequence: Synthetic peptide
  Seed: HIHIFSFTGEEMATK
HIHLFSSTWEESATK

SEQ ID NO: 283518 - protein, 15 aa, Artificial Sequence
  Description of Artificial Sequence: Synthetic peptide
  Seed: HIHIFSFTGEEMATK
HIHLFSTTLEETATK

SEQ ID NO: 283519 - protein, 15 aa, Artificial Sequence
  Description of Artificial Sequence: Synthetic peptide
  Seed: HIHIFSFTGEEMATK
HIHMFSSTLEEFATK

SEQ ID NO: 283520 - protein, 15 aa, Artificial Sequence
  Description of Artificial Sequence: Synthetic peptide
  Seed: HIHIFSFTGEEMATK
HIHFFSFTREEFATK

SEQ ID NO: 283521 - protein, 15 aa, Artificial Sequence
  Description of Artificial Sequence: Synthetic peptide
  Seed: HIHIFSFTGEEMATK
HIHYFSSTYEETATK

SEQ ID NO: 283522 - protein, 15 aa, Artificial Sequence
  Description of Artificial Sequence: Synthetic peptide
  Seed: HIHIFSFTGEEMATK
HIHTFSHTFEELATK

SEQ ID NO: 283523 - protein, 15 aa, Artificial Sequence
  Description of Artificial Sequence: Synthetic peptide
  Seed: HIHIFSFTGEEMATK
HIHLFSRTFEEYATK

SEQ ID NO: 283524 - protein, 15 aa, Artificial Sequence
  Description of Artificial Sequence: Synthetic peptide
  Seed: HIHIFSFTGEEMATK
HIHLFSFTIEEAATK

SEQ ID NO: 283525 - protein, 15 aa, Artificial Sequence
  Description of Artificial Sequence: Synthetic peptide
  Seed: HIHIFSFTGEEMATK
HIHYFSLTMEEPATK

SEQ ID NO: 283526 - protein, 15 aa, Artificial Sequence
  Description of Artificial Sequence: Synthetic peptide
  Seed: HIHIFSFTGEEMATK
HIHFFSFTIEEKATK

SEQ ID NO: 283527 - protein, 15 aa, Artificial Sequence
  Description of Artificial Sequence: Synthetic peptide
  Seed: HIHIFSFTGEEMATK
HIHWFSITAEEFATK

SEQ ID NO: 283528 - protein, 15 aa, Artificial Sequence
  Description of Artificial Sequence: Synthetic peptide
  Seed: HIHIFSFTGEEMATK
HIHLFSATIEEVATK

SEQ ID NO: 283529 - protein, 15 aa, Artificial Sequence
  Description of Artificial Sequence: Synthetic peptide
  Seed: HIHIFSFTGEEMATK
HIHCFSLTYEEFATK

SEQ ID NO: 283530 - protein, 15 aa, Artificial Sequence
  Description of Artificial Sequence: Synthetic peptide
  Seed: HIHIFSFTGEEMATK
HIHFFSSTWEEDATK

SEQ ID NO: 283531 - protein, 15 aa, Artificial Sequence
  Description of Artificial Sequence: Synthetic peptide
  Seed: HIHIFSFTGEEMATK
HIHFFSFTVEEEATK

SEQ ID NO: 283532 - protein, 15 aa, Artificial Sequence
  Description of Artificial Sequence: Synthetic peptide
  Seed: HIHIFSFTGEEMATK
HIHFFSKTFEEKATK

SEQ ID NO: 283533 - protein, 15 aa, Artificial Sequence
  Description of Artificial Sequence: Synthetic peptide
  Seed: HIHIFSFTGEEMATK
HIHYFSFTWEETATK

SEQ ID NO: 283534 - protein, 15 aa, Artificial Sequence
  Description of Artificial Sequence: Synthetic peptide
  Seed: HIHIFSFTGEEMATK
HIHLFSSTLEETATK

SEQ ID NO: 283535 - protein, 15 aa, Artificial Sequence
  Description of Artificial Sequence: Synthetic peptide
  Seed: HIHIFSFTGEEMATK
HIHRFSFTIEEFATK

SEQ ID NO: 283536 - protein, 15 aa, Artificial Sequence
  Description of Artificial Sequence: Synthetic peptide
  Seed: HIHIFSFTGEEMATK
HIHFFSHTYEEEATK

SEQ ID NO: 283537 - protein, 15 aa, Artificial Sequence
  Description of Artificial Sequence: Synthetic peptide
  Seed: HIHIFSFTGEEMATK
HIHFFSETLEEAATK

SEQ ID NO: 283538 - protein, 15 aa, Artificial Sequence
  Description of Artificial Sequence: Synthetic peptide
  Seed: HIHIFSFTGEEMATK
HIHKFSHTFEEIATK

SEQ ID NO: 283539 - protein, 15 aa, Artificial Sequence
  Description of Artificial Sequence: Synthetic peptide
  Seed: HIHIFSFTGEEMATK
HIHRFSFTLEEIATK

SEQ ID NO: 283540 - protein, 15 aa, Artificial Sequence
  Description of Artificial Sequence: Synthetic peptide
  Seed: HIHIFSFTGEEMATK
HIHPFSLTFEEFATK

SEQ ID NO: 283541 - protein, 15 aa, Artificial Sequence
  Description of Artificial Sequence: Synthetic peptide
  Seed: HIHIFSFTGEEMATK
HIHKFSETFEELATK

SEQ ID NO: 283542 - protein, 15 aa, Artificial Sequence
  Description of Artificial Sequence: Synthetic peptide
  Seed: HIHIFSFTGEEMATK
HIHFFSHTWEEHATK

SEQ ID NO: 283543 - protein, 15 aa, Artificial Sequence
  Description of Artificial Sequence: Synthetic peptide
  Seed: HIHIFSFTGEEMATK
HIHFFSATIEEEATK

SEQ ID NO: 283544 - protein, 15 aa, Artificial Sequence
  Description of Artificial Sequence: Synthetic peptide
  Seed: HIHIFSFTGEEMATK
HIHFFSHTLEEEATK

SEQ ID NO: 283545 - protein, 15 aa, Artificial Sequence
  Description of Artificial Sequence: Synthetic peptide
  Seed: HIHIFSFTGEEMATK
HIHRFSITLEEIATK

SEQ ID NO: 283546 - protein, 15 aa, Artificial Sequence
  Description of Artificial Sequence: Synthetic peptide
  Seed: HIHIFSFTGEEMATK
HIHFFSETWEEYATK

SEQ ID NO: 283547 - protein, 15 aa, Artificial Sequence
  Description of Artificial Sequence: Synthetic peptide
  Seed: HIHIFSFTGEEMATK
HIHFFSFTAEEWATK

SEQ ID NO: 283548 - protein, 15 aa, Artificial Sequence
  Description of Artificial Sequence: Synthetic peptide
  Seed: HIHIFSFTGEEMATK
HIHFFSHTLEENATK

SEQ ID NO: 283549 - protein, 15 aa, Artificial Sequence
  Description of Artificial Sequence: Synthetic peptide
  Seed: HIHIFSFTGEEMATK
HIHIFSFTIEEAATK

SEQ ID NO: 283550 - protein, 15 aa, Artificial Sequence
  Description of Artificial Sequence: Synthetic peptide
  Seed: HIHIFSFTGEEMATK
HIHLFSFTAEEMATK

SEQ ID NO: 283551 - protein, 15 aa, Artificial Sequence
  Description of Artificial Sequence: Synthetic peptide
  Seed: HIHIFSFTGEEMATK
HIHLFSNTFEENATK

SEQ ID NO: 283552 - protein, 15 aa, Artificial Sequence
  Description of Artificial Sequence: Synthetic peptide
  Seed: HIHIFSFTGEEMATK
HIHFFSVTIEERATK

SEQ ID NO: 283553 - protein, 15 aa, Artificial Sequence
  Description of Artificial Sequence: Synthetic peptide
  Seed: HIHIFSFTGEEMATK
HIHFFSKTLEEYATK

SEQ ID NO: 283554 - protein, 15 aa, Artificial Sequence
  Description of Artificial Sequence: Synthetic peptide
  Seed: HIHIFSFTGEEMATK
HIHIFSHTFEERATK

SEQ ID NO: 283555 - protein, 15 aa, Artificial Sequence
  Description of Artificial Sequence: Synthetic peptide
  Seed: HIHIFSFTGEEMATK
HIHLFSETWEEVATK

SEQ ID NO: 283556 - protein, 15 aa, Artificial Sequence
  Description of Artificial Sequence: Synthetic peptide
  Seed: HIHIFSFTGEEMATK
HIHLFSLTLEEPATK

SEQ ID NO: 283557 - protein, 15 aa, Artificial Sequence
  Description of Artificial Sequence: Synthetic peptide
  Seed: HIHIFSFTGEEMATK
HIHMFSETFEEYATK

SEQ ID NO: 283558 - protein, 15 aa, Artificial Sequence
  Description of Artificial Sequence: Synthetic peptide
  Seed: HIHIFSFTGEEMATK
HIHFFSLTHEEFATK

SEQ ID NO: 283559 - protein, 15 aa, Artificial Sequence
  Description of Artificial Sequence: Synthetic peptide
  Seed: HIHIFSFTGEEMATK
HIHFFSWTAEEMATK

SEQ ID NO: 283560 - protein, 15 aa, Artificial Sequence
  Description of Artificial Sequence: Synthetic peptide
  Seed: HIHIFSFTGEEMATK
HIHMFSETFEETATK

SEQ ID NO: 283561 - protein, 15 aa, Artificial Sequence
  Description of Artificial Sequence: Synthetic peptide
  Seed: HIHIFSFTGEEMATK
HIHYFSHTFEEKATK

SEQ ID NO: 283562 - protein, 15 aa, Artificial Sequence
  Description of Artificial Sequence: Synthetic peptide
  Seed: HIHIFSFTGEEMATK
HIHFFSFTAEERATK

SEQ ID NO: 283563 - protein, 15 aa, Artificial Sequence
  Description of Artificial Sequence: Synthetic peptide
  Seed: HIHIFSFTGEEMATK
HIHLFSITLEEPATK

SEQ ID NO: 283564 - protein, 15 aa, Artificial Sequence
  Description of Artificial Sequence: Synthetic peptide
  Seed: HIHIFSFTGEEMATK
HIHIFSSTIEEVATK

SEQ ID NO: 283565 - protein, 15 aa, Artificial Sequence
  Description of Artificial Sequence: Synthetic peptide
  Seed: HIHIFSFTGEEMATK
HIHFFSITVEERATK

SEQ ID NO: 283566 - protein, 15 aa, Artificial Sequence
  Description of Artificial Sequence: Synthetic peptide
  Seed: HIHIFSFTGEEMATK
HIHLFSFTSEELATK

SEQ ID NO: 283567 - protein, 15 aa, Artificial Sequence
  Description of Artificial Sequence: Synthetic peptide
  Seed: HIHIFSFTGEEMATK
HIHYFSLTLEEPATK

SEQ ID NO: 283568 - protein, 15 aa, Artificial Sequence
  Description of Artificial Sequence: Synthetic peptide
  Seed: HIHIFSFTGEEMATK
HIHFFSTTYEECATK

SEQ ID NO: 283569 - protein, 15 aa, Artificial Sequence
  Description of Artificial Sequence: Synthetic peptide
  Seed: HIHIFSFTGEEMATK
HIHIFSATIEEVATK

SEQ ID NO: 283570 - protein, 15 aa, Artificial Sequence
  Description of Artificial Sequence: Synthetic peptide
  Seed: HIHIFSFTGEEMATK
HIHRFSETFEEVATK

SEQ ID NO: 283571 - protein, 15 aa, Artificial Sequence
  Description of Artificial Sequence: Synthetic peptide
  Seed: HIHIFSFTGEEMATK
HIHLFSRTYEELATK

SEQ ID NO: 283572 - protein, 15 aa, Artificial Sequence
  Description of Artificial Sequence: Synthetic peptide
  Seed: HIHIFSFTGEEMATK
HIHLFSFTSEEFATK

SEQ ID NO: 283573 - protein, 15 aa, Artificial Sequence
  Description of Artificial Sequence: Synthetic peptide
  Seed: HIHIFSFTGEEMATK
HIHFFSVTIEEKATK

SEQ ID NO: 283574 - protein, 15 aa, Artificial Sequence
  Description of Artificial Sequence: Synthetic peptide
  Seed: HIHIFSFTGEEMATK
HIHYFSSTFEEGATK

SEQ ID NO: 283575 - protein, 15 aa, Artificial Sequence
  Description of Artificial Sequence: Synthetic peptide
  Seed: HIHIFSFTGEEMATK
HIHWFSFTSEELATK

SEQ ID NO: 283576 - protein, 15 aa, Artificial Sequence
  Description of Artificial Sequence: Synthetic peptide
  Seed: HIHIFSFTGEEMATK
HIHFFSYTAEEMATK

SEQ ID NO: 283577 - protein, 15 aa, Artificial Sequence
  Description of Artificial Sequence: Synthetic peptide
  Seed: HIHIFSFTGEEMATK
HIHFFSCTFEERATK

SEQ ID NO: 283578 - protein, 15 aa, Artificial Sequence
  Description of Artificial Sequence: Synthetic peptide
  Seed: HIHIFSFTGEEMATK
HIHFFSHTMEEWATK

SEQ ID NO: 283579 - protein, 15 aa, Artificial Sequence
  Description of Artificial Sequence: Synthetic peptide
  Seed: HIHIFSFTGEEMATK
HIHAFSHTFEEIATK

SEQ ID NO: 283580 - protein, 15 aa, Artificial Sequence
  Description of Artificial Sequence: Synthetic peptide
  Seed: HIHIFSFTGEEMATK
HIHFFSDTFEEPATK

SEQ ID NO: 283581 - protein, 15 aa, Artificial Sequence
  Description of Artificial Sequence: Synthetic peptide
  Seed: HIHIFSFTGEEMATK
HIHFFSHTYEEQATK

SEQ ID NO: 283582 - protein, 15 aa, Artificial Sequence
  Description of Artificial Sequence: Synthetic peptide
  Seed: HIHIFSFTGEEMATK
HIHFFSYTIEESATK

SEQ ID NO: 283583 - protein, 15 aa, Artificial Sequence
  Description of Artificial Sequence: Synthetic peptide
  Seed: HIHIFSFTGEEMATK
HIHFFSDTFEENATK

SEQ ID NO: 283584 - protein, 15 aa, Artificial Sequence
  Description of Artificial Sequence: Synthetic peptide
  Seed: HIHIFSFTGEEMATK
HIHFFSETWEETATK

SEQ ID NO: 283585 - protein, 15 aa, Artificial Sequence
  Description of Artificial Sequence: Synthetic peptide
  Seed: HIHIFSFTGEEMATK
HIHFFSHTIEEAATK

SEQ ID NO: 283586 - protein, 15 aa, Artificial Sequence
  Description of Artificial Sequence: Synthetic peptide
  Seed: HIHIFSFTGEEMATK
HIHLFSATIEEMATK

SEQ ID NO: 283587 - protein, 15 aa, Artificial Sequence
  Description of Artificial Sequence: Synthetic peptide
  Seed: HIHIFSFTGEEMATK
HIHFFSWTSEELATK

SEQ ID NO: 283588 - protein, 15 aa, Artificial Sequence
  Description of Artificial Sequence: Synthetic peptide
  Seed: HIHIFSFTGEEMATK
HIHFFSYTYEESATK

SEQ ID NO: 283589 - protein, 15 aa, Artificial Sequence
  Description of Artificial Sequence: Synthetic peptide
  Seed: HIHIFSFTGEEMATK
HIHFFSETYEEAATK

SEQ ID NO: 283590 - protein, 15 aa, Artificial Sequence
  Description of Artificial Sequence: Synthetic peptide
  Seed: HIHIFSFTGEEMATK
HIHVFSATLEEFATK

SEQ ID NO: 283591 - protein, 15 aa, Artificial Sequence
  Description of Artificial Sequence: Synthetic peptide
  Seed: HIHIFSFTGEEMATK
HIHFFSNTYEETATK

SEQ ID NO: 283592 - protein, 15 aa, Artificial Sequence
  Description of Artificial Sequence: Synthetic peptide
  Seed: HIHIFSFTGEEMATK
HIHMFSITIEEMATK

SEQ ID NO: 283593 - protein, 15 aa, Artificial Sequence
  Description of Artificial Sequence: Synthetic peptide
  Seed: HIHIFSFTGEEMATK
HIHMFSFTAEEIATK

SEQ ID NO: 283594 - protein, 15 aa, Artificial Sequence
  Description of Artificial Sequence: Synthetic peptide
  Seed: HIHIFSFTGEEMATK
HIHCFSLTIEEFATK

SEQ ID NO: 283595 - protein, 15 aa, Artificial Sequence
  Description of Artificial Sequence: Synthetic peptide
  Seed: HIHIFSFTGEEMATK
HIHFFSETLEETATK

SEQ ID NO: 283596 - protein, 15 aa, Artificial Sequence
  Description of Artificial Sequence: Synthetic peptide
  Seed: HIHIFSFTGEEMATK
HIHYFSATLEETATK

SEQ ID NO: 283597 - protein, 15 aa, Artificial Sequence
  Description of Artificial Sequence: Synthetic peptide
  Seed: HIHIFSFTGEEMATK
HIHFFSYTWEESATK

SEQ ID NO: 283598 - protein, 15 aa, Artificial Sequence
  Description of Artificial Sequence: Synthetic peptide
  Seed: HIHIFSFTGEEMATK
HIHYFSITSEEFATK

SEQ ID NO: 283599 - protein, 15 aa, Artificial Sequence
  Description of Artificial Sequence: Synthetic peptide
  Seed: HIHIFSFTGEEMATK
HIHFFSLTREELATK

SEQ ID NO: 283600 - protein, 15 aa, Artificial Sequence
  Description of Artificial Sequence: Synthetic peptide
  Seed: HIHIFSFTGEEMATK
HIHIFSFTTEELATK

SEQ ID NO: 283601 - protein, 15 aa, Artificial Sequence
  Description of Artificial Sequence: Synthetic peptide
  Seed: HIHIFSFTGEEMATK
HIHCFSITIEEFATK

SEQ ID NO: 283602 - protein, 15 aa, Artificial Sequence
  Description of Artificial Sequence: Synthetic peptide
  Seed: HIHIFSFTGEEMATK
HIHIFSATIEEMATK

SEQ ID NO: 283603 - protein, 15 aa, Artificial Sequence
  Description of Artificial Sequence: Synthetic peptide
  Seed: HIHIFSFTGEEMATK
HIHKFSLTLEEFATK

SEQ ID NO: 283604 - protein, 15 aa, Artificial Sequence
  Description of Artificial Sequence: Synthetic peptide
  Seed: HIHIFSFTGEEMATK
HIHFFSGTIEEVATK

SEQ ID NO: 283605 - protein, 15 aa, Artificial Sequence
  Description of Artificial Sequence: Synthetic peptide
  Seed: HIHIFSFTGEEMATK
HIHFFSFTNEEMATK

SEQ ID NO: 283606 - protein, 15 aa, Artificial Sequence
  Description of Artificial Sequence: Synthetic peptide
  Seed: HIHIFSFTGEEMATK
HIHIFSFTIEESATK

SEQ ID NO: 283607 - protein, 15 aa, Artificial Sequence
  Description of Artificial Sequence: Synthetic peptide
  Seed: HIHIFSFTGEEMATK
HIHIFSMTAEEFATK

SEQ ID NO: 283608 - protein, 15 aa, Artificial Sequence
  Description of Artificial Sequence: Synthetic peptide
  Seed: HIHIFSFTGEEMATK
HIHIFSWTAEELATK

SEQ ID NO: 283609 - protein, 15 aa, Artificial Sequence
  Description of Artificial Sequence: Synthetic peptide
  Seed: HIHIFSFTGEEMATK
HIHFFSATQEELATK

SEQ ID NO: 283610 - protein, 15 aa, Artificial Sequence
  Description of Artificial Sequence: Synthetic peptide
  Seed: HIHIFSFTGEEMATK
HIHFFSNTWEEYATK

SEQ ID NO: 283611 - protein, 15 aa, Artificial Sequence
  Description of Artificial Sequence: Synthetic peptide
  Seed: HIHIFSFTGEEMATK
HIHYFSSTFEECATK

SEQ ID NO: 283612 - protein, 15 aa, Artificial Sequence
  Description of Artificial Sequence: Synthetic peptide
  Seed: HIHIFSFTGEEMATK
HIHFFSYTFEEGATK

SEQ ID NO: 283613 - protein, 15 aa, Artificial Sequence
  Description of Artificial Sequence: Synthetic peptide
  Seed: HIHIFSFTGEEMATK
HIHFFSATHEELATK

SEQ ID NO: 283614 - protein, 15 aa, Artificial Sequence
  Description of Artificial Sequence: Synthetic peptide
  Seed: HIHIFSFTGEEMATK
HIHMFSITAEEFATK

SEQ ID NO: 283615 - protein, 15 aa, Artificial Sequence
  Description of Artificial Sequence: Synthetic peptide
  Seed: HIHIFSFTGEEMATK
HIHYFSITLEEHATK

SEQ ID NO: 283616 - protein, 15 aa, Artificial Sequence
  Description of Artificial Sequence: Synthetic peptide
  Seed: HIHIFSFTGEEMATK
HIHYFSFTSEEMATK

SEQ ID NO: 283617 - protein, 15 aa, Artificial Sequence
  Description of Artificial Sequence: Synthetic peptide
  Seed: HIHIFSFTGEEMATK
HIHFFSATNEEHATK

SEQ ID NO: 283618 - protein, 15 aa, Artificial Sequence
  Description of Artificial Sequence: Synthetic peptide
  Seed: HIHIFSFTGEEMATK
HIHFFSWTVEEAATK

SEQ ID NO: 283619 - protein, 15 aa, Artificial Sequence
  Description of Artificial Sequence: Synthetic peptide
  Seed: HIHIFSFTGEEMATK
HIHRFSFTLEELATK

SEQ ID NO: 283620 - protein, 15 aa, Artificial Sequence
  Description of Artificial Sequence: Synthetic peptide
  Seed: HIHIFSFTGEEMATK
HIHMFSLTAEEFATK

SEQ ID NO: 283621 - protein, 15 aa, Artificial Sequence
  Description of Artificial Sequence: Synthetic peptide
  Seed: HIHIFSFTGEEMATK
HIHFFSITNEEFATK

SEQ ID NO: 283622 - protein, 15 aa, Artificial Sequence
  Description of Artificial Sequence: Synthetic peptide
  Seed: HIHIFSFTGEEMATK
HIHLFSETYEEFATK

SEQ ID NO: 283623 - protein, 15 aa, Artificial Sequence
  Description of Artificial Sequence: Synthetic peptide
  Seed: HIHIFSFTGEEMATK
HIHYFSLTYEEHATK

SEQ ID NO: 283624 - protein, 15 aa, Artificial Sequence
  Description of Artificial Sequence: Synthetic peptide
  Seed: HIHIFSFTGEEMATK
HIHYFSWTAEELATK

SEQ ID NO: 283625 - protein, 15 aa, Artificial Sequence
  Description of Artificial Sequence: Synthetic peptide
  Seed: HIHIFSFTGEEMATK
HIHLFSQTFEENATK

SEQ ID NO: 283626 - protein, 15 aa, Artificial Sequence
  Description of Artificial Sequence: Synthetic peptide
  Seed: HIHIFSFTGEEMATK
HIHIFSRTWEELATK

SEQ ID NO: 283627 - protein, 15 aa, Artificial Sequence
  Description of Artificial Sequence: Synthetic peptide
  Seed: HIHIFSFTGEEMATK
HIHMFSYTMEEIATK

SEQ ID NO: 283628 - protein, 15 aa, Artificial Sequence
  Description of Artificial Sequence: Synthetic peptide
  Seed: HIHIFSFTGEEMATK
HIHMFSITLEEAATK

SEQ ID NO: 283629 - protein, 15 aa, Artificial Sequence
  Description of Artificial Sequence: Synthetic peptide
  Seed: HIHIFSFTGEEMATK
HIHFFSNTWEEAATK

SEQ ID NO: 283630 - protein, 15 aa, Artificial Sequence
  Description of Artificial Sequence: Synthetic peptide
  Seed: HIHIFSFTGEEMATK
HIHFFSFTAEEEATK

SEQ ID NO: 283631 - protein, 15 aa, Artificial Sequence
  Description of Artificial Sequence: Synthetic peptide
  Seed: HIHIFSFTGEEMATK
HIHMFSMTIEEVATK

SEQ ID NO: 283632 - protein, 15 aa, Artificial Sequence
  Description of Artificial Sequence: Synthetic peptide
  Seed: HIHIFSFTGEEMATK
HIHYFSETLEEVATK

SEQ ID NO: 283633 - protein, 15 aa, Artificial Sequence
  Description of Artificial Sequence: Synthetic peptide
  Seed: HIHIFSFTGEEMATK
HIHYFSLTWEEAATK

SEQ ID NO: 283634 - protein, 15 aa, Artificial Sequence
  Description of Artificial Sequence: Synthetic peptide
  Seed: HIHIFSFTGEEMATK
HIHFFSETLEESATK

SEQ ID NO: 283635 - protein, 15 aa, Artificial Sequence
  Description of Artificial Sequence: Synthetic peptide
  Seed: HIHIFSFTGEEMATK
HIHMFSFTAEEVATK

SEQ ID NO: 283636 - protein, 15 aa, Artificial Sequence
  Description of Artificial Sequence: Synthetic peptide
  Seed: HIHIFSFTGEEMATK
HIHYFSKTFEEWATK

SEQ ID NO: 283637 - protein, 15 aa, Artificial Sequence
  Description of Artificial Sequence: Synthetic peptide
  Seed: HIHIFSFTGEEMATK
HIHYFSFTIEEEATK

SEQ ID NO: 283638 - protein, 15 aa, Artificial Sequence
  Description of Artificial Sequence: Synthetic peptide
  Seed: HIHIFSFTGEEMATK
HIHVFSFTAEEMATK

SEQ ID NO: 283639 - protein, 15 aa, Artificial Sequence
  Description of Artificial Sequence: Synthetic peptide
  Seed: HIHIFSFTGEEMATK
HIHYFSNTWEEIATK

SEQ ID NO: 283640 - protein, 15 aa, Artificial Sequence
  Description of Artificial Sequence: Synthetic peptide
  Seed: HIHIFSFTGEEMATK
HIHVFSLTAEEFATK

SEQ ID NO: 283641 - protein, 15 aa, Artificial Sequence
  Description of Artificial Sequence: Synthetic peptide
  Seed: HIHIFSFTGEEMATK
HIHFFSDTIEEFATK

SEQ ID NO: 283642 - protein, 15 aa, Artificial Sequence
  Description of Artificial Sequence: Synthetic peptide
  Seed: HIHIFSFTGEEMATK
HIHIFSMTVEEFATK

SEQ ID NO: 283643 - protein, 15 aa, Artificial Sequence
  Description of Artificial Sequence: Synthetic peptide
  Seed: HIHIFSFTGEEMATK
HIHYFSATVEEFATK

SEQ ID NO: 283644 - protein, 15 aa, Artificial Sequence
  Description of Artificial Sequence: Synthetic peptide
  Seed: HIHIFSFTGEEMATK
HIHYFSFTTEEVATK

SEQ ID NO: 283645 - protein, 15 aa, Artificial Sequence
  Description of Artificial Sequence: Synthetic peptide
  Seed: HIHIFSFTGEEMATK
HIHFFSWTIEEHATK

SEQ ID NO: 283646 - protein, 15 aa, Artificial Sequence
  Description of Artificial Sequence: Synthetic peptide
  Seed: HIHIFSFTGEEMATK
HIHLFSETFEENATK

SEQ ID NO: 283647 - protein, 15 aa, Artificial Sequence
  Description of Artificial Sequence: Synthetic peptide
  Seed: HIHIFSFTGEEMATK
HIHFFSATIEEDATK

SEQ ID NO: 283648 - protein, 15 aa, Artificial Sequence
  Description of Artificial Sequence: Synthetic peptide
  Seed: HIHIFSFTGEEMATK
HIHVFSETFEEAATK

SEQ ID NO: 283649 - protein, 15 aa, Artificial Sequence
  Description of Artificial Sequence: Synthetic peptide
  Seed: HIHIFSFTGEEMATK
HIHYFSMTYEETATK

SEQ ID NO: 283650 - protein, 15 aa, Artificial Sequence
  Description of Artificial Sequence: Synthetic peptide
  Seed: HIHIFSFTGEEMATK
HIHIFSVTAEEFATK

SEQ ID NO: 283651 - protein, 15 aa, Artificial Sequence
  Description of Artificial Sequence: Synthetic peptide
  Seed: HIHIFSFTGEEMATK
HIHFFSITEEELATK

SEQ ID NO: 283652 - protein, 15 aa, Artificial Sequence
  Description of Artificial Sequence: Synthetic peptide
  Seed: HIHIFSFTGEEMATK
HIHMFSFTAEEMATK

SEQ ID NO: 283653 - protein, 15 aa, Artificial Sequence
  Description of Artificial Sequence: Synthetic peptide
  Seed: HIHIFSFTGEEMATK
HIHFFSFTSEERATK

SEQ ID NO: 283654 - protein, 15 aa, Artificial Sequence
  Description of Artificial Sequence: Synthetic peptide
  Seed: HIHIFSFTGEEMATK
HIHLFSFTSEEIATK

SEQ ID NO: 283655 - protein, 15 aa, Artificial Sequence
  Description of Artificial Sequence: Synthetic peptide
  Seed: HIHIFSFTGEEMATK
HIHFFSVTYEECATK

SEQ ID NO: 283656 - protein, 15 aa, Artificial Sequence
  Description of Artificial Sequence: Synthetic peptide
  Seed: HIHIFSFTGEEMATK
HIHYFSMTLEERATK

SEQ ID NO: 283657 - protein, 15 aa, Artificial Sequence
  Description of Artificial Sequence: Synthetic peptide
  Seed: HIHIFSFTGEEMATK
HIHLFSATLEETATK

SEQ ID NO: 283658 - protein, 15 aa, Artificial Sequence
  Description of Artificial Sequence: Synthetic peptide
  Seed: HIHIFSFTGEEMATK
HIHFFSDTFEEHATK

SEQ ID NO: 283659 - protein, 15 aa, Artificial Sequence
  Description of Artificial Sequence: Synthetic peptide
  Seed: HIHIFSFTGEEMATK
HIHWFSVTAEEFATK

SEQ ID NO: 283660 - protein, 15 aa, Artificial Sequence
  Description of Artificial Sequence: Synthetic peptide
  Seed: HIHIFSFTGEEMATK
HIHCFSVTLEEFATK

SEQ ID NO: 283661 - protein, 15 aa, Artificial Sequence
  Description of Artificial Sequence: Synthetic peptide
  Seed: HIHIFSFTGEEMATK
HIHFFSMTYEEQATK

SEQ ID NO: 283662 - protein, 15 aa, Artificial Sequence
  Description of Artificial Sequence: Synthetic peptide
  Seed: HIHIFSFTGEEMATK
HIHLFSMTVEEIATK

SEQ ID NO: 283663 - protein, 15 aa, Artificial Sequence
  Description of Artificial Sequence: Synthetic peptide
  Seed: HIHIFSFTGEEMATK
HIHLFSMTAEEFATK

SEQ ID NO: 283664 - protein, 15 aa, Artificial Sequence
  Description of Artificial Sequence: Synthetic peptide
  Seed: HIHIFSFTGEEMATK
HIHFFSCTIEEIATK

SEQ ID NO: 283665 - protein, 15 aa, Artificial Sequence
  Description of Artificial Sequence: Synthetic peptide
  Seed: HIHIFSFTGEEMATK
HIHFFSYTVEEAATK

SEQ ID NO: 283666 - protein, 15 aa, Artificial Sequence
  Description of Artificial Sequence: Synthetic peptide
  Seed: HIHIFSFTGEEMATK
HIHIFSFTSEEMATK

SEQ ID NO: 283667 - protein, 15 aa, Artificial Sequence
  Description of Artificial Sequence: Synthetic peptide
  Seed: HIHIFSFTGEEMATK
HIHLFSVTAEEFATK

SEQ ID NO: 283668 - protein, 15 aa, Artificial Sequence
  Description of Artificial Sequence: Synthetic peptide
  Seed: HIHIFSFTGEEMATK
HIHIFSMTVEEIATK

SEQ ID NO: 283669 - protein, 15 aa, Artificial Sequence
  Description of Artificial Sequence: Synthetic peptide
  Seed: HIHIFSFTGEEMATK
HIHYFSFTTEEMATK

SEQ ID NO: 283670 - protein, 15 aa, Artificial Sequence
  Description of Artificial Sequence: Synthetic peptide
  Seed: HIHIFSFTGEEMATK
HIHYFSITMEEWATK

SEQ ID NO: 283671 - protein, 15 aa, Artificial Sequence
  Description of Artificial Sequence: Synthetic peptide
  Seed: HIHIFSFTGEEMATK
HIHIFSITLEESATK

SEQ ID NO: 283672 - protein, 15 aa, Artificial Sequence
  Description of Artificial Sequence: Synthetic peptide
  Seed: HIHIFSFTGEEMATK
HIHIFSFTPEEMATK

SEQ ID NO: 283673 - protein, 15 aa, Artificial Sequence
  Description of Artificial Sequence: Synthetic peptide
  Seed: HIHIFSFTGEEMATK
HIHIFSKTYEEFATK

SEQ ID NO: 283674 - protein, 15 aa, Artificial Sequence
  Description of Artificial Sequence: Synthetic peptide
  Seed: HIHIFSFTGEEMATK
HIHYFSWTVEEVATK

SEQ ID NO: 283675 - protein, 15 aa, Artificial Sequence
  Description of Artificial Sequence: Synthetic peptide
  Seed: HIHIFSFTGEEMATK
HIHLFSATFEECATK

SEQ ID NO: 283676 - protein, 15 aa, Artificial Sequence
  Description of Artificial Sequence: Synthetic peptide
  Seed: HIHIFSFTGEEMATK
HIHIFSLTSEEFATK

SEQ ID NO: 283677 - protein, 15 aa, Artificial Sequence
  Description of Artificial Sequence: Synthetic peptide
  Seed: HIHIFSFTGEEMATK
HIHFFSWTPEEIATK

SEQ ID NO: 283678 - protein, 15 aa, Artificial Sequence
  Description of Artificial Sequence: Synthetic peptide
  Seed: HIHIFSFTGEEMATK
HIHMFSMTMEEVATK

SEQ ID NO: 283679 - protein, 15 aa, Artificial Sequence
  Description of Artificial Sequence: Synthetic peptide
  Seed: HIHIFSFTGEEMATK
HIHFFSMTIEEWATK

SEQ ID NO: 283680 - protein, 15 aa, Artificial Sequence
  Description of Artificial Sequence: Synthetic peptide
  Seed: HIHIFSFTGEEMATK
HIHFFSMTREELATK

SEQ ID NO: 283681 - protein, 15 aa, Artificial Sequence
  Description of Artificial Sequence: Synthetic peptide
  Seed: HIHIFSFTGEEMATK
HIHFFSITNEEPATK

SEQ ID NO: 283682 - protein, 15 aa, Artificial Sequence
  Description of Artificial Sequence: Synthetic peptide
  Seed: HIHIFSFTGEEMATK
HIHYFSSTVEEVATK

SEQ ID NO: 283683 - protein, 15 aa, Artificial Sequence
  Description of Artificial Sequence: Synthetic peptide
  Seed: HIHIFSFTGEEMATK
HIHWFSMTVEEFATK

SEQ ID NO: 283684 - protein, 15 aa, Artificial Sequence
  Description of Artificial Sequence: Synthetic peptide
  Seed: HIHIFSFTGEEMATK
HIHYFSLTMEEWATK

SEQ ID NO: 283685 - protein, 15 aa, Artificial Sequence
  Description of Artificial Sequence: Synthetic peptide
  Seed: HIHIFSFTGEEMATK
HIHFFSFTAEEKATK

SEQ ID NO: 283686 - protein, 15 aa, Artificial Sequence
  Description of Artificial Sequence: Synthetic peptide
  Seed: HIHIFSFTGEEMATK
HIHLFSFTNEELATK

SEQ ID NO: 283687 - protein, 15 aa, Artificial Sequence
  Description of Artificial Sequence: Synthetic peptide
  Seed: HIHIFSFTGEEMATK
HIHYFSKTMEELATK

SEQ ID NO: 283688 - protein, 15 aa, Artificial Sequence
  Description of Artificial Sequence: Synthetic peptide
  Seed: HIHIFSFTGEEMATK
HIHFFSLTEEELATK

SEQ ID NO: 283689 - protein, 15 aa, Artificial Sequence
  Description of Artificial Sequence: Synthetic peptide
  Seed: HIHIFSFTGEEMATK
HIHCFSMTLEELATK

SEQ ID NO: 283690 - protein, 15 aa, Artificial Sequence
  Description of Artificial Sequence: Synthetic peptide
  Seed: HIHIFSFTGEEMATK
HIHFFSITVEEWATK

SEQ ID NO: 283691 - protein, 15 aa, Artificial Sequence
  Description of Artificial Sequence: Synthetic peptide
  Seed: HIHIFSFTGEEMATK
HIHFFSKTYEEWATK

SEQ ID NO: 283692 - protein, 15 aa, Artificial Sequence
  Description of Artificial Sequence: Synthetic peptide
  Seed: HIHIFSFTGEEMATK
HIHIFSITIEEAATK

SEQ ID NO: 283693 - protein, 15 aa, Artificial Sequence
  Description of Artificial Sequence: Synthetic peptide
  Seed: HIHIFSFTGEEMATK
HIHLFSATLEERATK

SEQ ID NO: 283694 - protein, 15 aa, Artificial Sequence
  Description of Artificial Sequence: Synthetic peptide
  Seed: HIHIFSFTGEEMATK
HIHFFSETLEENATK

SEQ ID NO: 283695 - protein, 15 aa, Artificial Sequence
  Description of Artificial Sequence: Synthetic peptide
  Seed: HIHIFSFTGEEMATK
HIHIFSTTAEELATK

SEQ ID NO: 283696 - protein, 15 aa, Artificial Sequence
  Description of Artificial Sequence: Synthetic peptide
  Seed: HIHIFSFTGEEMATK
HIHVFSMTIEEMATK

SEQ ID NO: 283697 - protein, 15 aa, Artificial Sequence
  Description of Artificial Sequence: Synthetic peptide
  Seed: HIHIFSFTGEEMATK
HIHFFSFTYEECATK

SEQ ID NO: 283698 - protein, 15 aa, Artificial Sequence
  Description of Artificial Sequence: Synthetic peptide
  Seed: HIHIFSFTGEEMATK
HIHWFSFTTEEIATK

SEQ ID NO: 283699 - protein, 15 aa, Artificial Sequence
  Description of Artificial Sequence: Synthetic peptide
  Seed: HIHIFSFTGEEMATK
HIHFFSMTQEEFATK

SEQ ID NO: 283700 - protein, 15 aa, Artificial Sequence
  Description of Artificial Sequence: Synthetic peptide
  Seed: HIHIFSFTGEEMATK
HIHWFSFTPEEVATK

SEQ ID NO: 283701 - protein, 15 aa, Artificial Sequence
  Description of Artificial Sequence: Synthetic peptide
  Seed: HIHIFSFTGEEMATK
HIHFFSYTSEEIATK

SEQ ID NO: 283702 - protein, 15 aa, Artificial Sequence
  Description of Artificial Sequence: Synthetic peptide
  Seed: HIHIFSFTGEEMATK
HIHLFSITIEESATK

SEQ ID NO: 283703 - protein, 15 aa, Artificial Sequence
  Description of Artificial Sequence: Synthetic peptide
  Seed: HIHIFSFTGEEMATK
HIHFFSETYEESATK

SEQ ID NO: 283704 - protein, 15 aa, Artificial Sequence
  Description of Artificial Sequence: Synthetic peptide
  Seed: HIHIFSFTGEEMATK
HIHYFSETFEENATK

SEQ ID NO: 283705 - protein, 15 aa, Artificial Sequence
  Description of Artificial Sequence: Synthetic peptide
  Seed: HIHIFSFTGEEMATK
HIHFFSLTVEEWATK

SEQ ID NO: 283706 - protein, 15 aa, Artificial Sequence
  Description of Artificial Sequence: Synthetic peptide
  Seed: HIHIFSFTGEEMATK
HIHFFSLTREEIATK

SEQ ID NO: 283707 - protein, 15 aa, Artificial Sequence
  Description of Artificial Sequence: Synthetic peptide
  Seed: HIHIFSFTGEEMATK
HIHRFSITLEEMATK

SEQ ID NO: 283708 - protein, 15 aa, Artificial Sequence
  Description of Artificial Sequence: Synthetic peptide
  Seed: HIHIFSFTGEEMATK
HIHFFSVTGEEFATK

SEQ ID NO: 283709 - protein, 15 aa, Artificial Sequence
  Description of Artificial Sequence: Synthetic peptide
  Seed: HIHIFSFTGEEMATK
HIHFFSLTKEELATK

SEQ ID NO: 283710 - protein, 15 aa, Artificial Sequence
  Description of Artificial Sequence: Synthetic peptide
  Seed: HIHIFSFTGEEMATK
HIHFFSITEEEIATK

SEQ ID NO: 283711 - protein, 15 aa, Artificial Sequence
  Description of Artificial Sequence: Synthetic peptide
  Seed: HIHIFSFTGEEMATK
HIHMFSITLEERATK

SEQ ID NO: 283712 - protein, 15 aa, Artificial Sequence
  Description of Artificial Sequence: Synthetic peptide
  Seed: HIHIFSFTGEEMATK
HIHMFSETFEESATK

SEQ ID NO: 283713 - protein, 15 aa, Artificial Sequence
  Description of Artificial Sequence: Synthetic peptide
  Seed: HIHIFSFTGEEMATK
HIHFFSYTSEEVATK

SEQ ID NO: 283714 - protein, 15 aa, Artificial Sequence
  Description of Artificial Sequence: Synthetic peptide
  Seed: HIHIFSFTGEEMATK
HIHYFSTTAEEIATK

SEQ ID NO: 283715 - protein, 15 aa, Artificial Sequence
  Description of Artificial Sequence: Synthetic peptide
  Seed: HIHIFSFTGEEMATK
HIHIFSLTLEEHATK

SEQ ID NO: 283716 - protein, 15 aa, Artificial Sequence
  Description of Artificial Sequence: Synthetic peptide
  Seed: HIHIFSFTGEEMATK
HIHWFSLTLEESATK

SEQ ID NO: 283717 - protein, 15 aa, Artificial Sequence
  Description of Artificial Sequence: Synthetic peptide
  Seed: HIHIFSFTGEEMATK
HIHWFSETFEESATK

SEQ ID NO: 283718 - protein, 15 aa, Artificial Sequence
  Description of Artificial Sequence: Synthetic peptide
  Seed: HIHIFSFTGEEMATK
HIHCFSFTIEEIATK

SEQ ID NO: 283719 - protein, 15 aa, Artificial Sequence
  Description of Artificial Sequence: Synthetic peptide
  Seed: HIHIFSFTGEEMATK
HIHYFSFTVEEQATK

SEQ ID NO: 283720 - protein, 15 aa, Artificial Sequence
  Description of Artificial Sequence: Synthetic peptide
  Seed: HIHIFSFTGEEMATK
HIHWFSQTFEESATK

SEQ ID NO: 283721 - protein, 15 aa, Artificial Sequence
  Description of Artificial Sequence: Synthetic peptide
  Seed: HIHIFSFTGEEMATK
HIHYFSFTIEEDATK

SEQ ID NO: 283722 - protein, 15 aa, Artificial Sequence
  Description of Artificial Sequence: Synthetic peptide
  Seed: HIHIFSFTGEEMATK
HIHIFSITAEEYATK

SEQ ID NO: 283723 - protein, 15 aa, Artificial Sequence
  Description of Artificial Sequence: Synthetic peptide
  Seed: HIHIFSFTGEEMATK
HIHIFSATVEEIATK

SEQ ID NO: 283724 - protein, 15 aa, Artificial Sequence
  Description of Artificial Sequence: Synthetic peptide
  Seed: HIHIFSFTGEEMATK
HIHFFSRTWEEAATK

SEQ ID NO: 283725 - protein, 15 aa, Artificial Sequence
  Description of Artificial Sequence: Synthetic peptide
  Seed: HIHIFSFTGEEMATK
HIHWFSLTVEEYATK

SEQ ID NO: 283726 - protein, 15 aa, Artificial Sequence
  Description of Artificial Sequence: Synthetic peptide
  Seed: HIHIFSFTGEEMATK
HIHFFSHTSEELATK

SEQ ID NO: 283727 - protein, 15 aa, Artificial Sequence
  Description of Artificial Sequence: Synthetic peptide
  Seed: HIHIFSFTGEEMATK
HIHFFSFTAEEDATK

SEQ ID NO: 283728 - protein, 15 aa, Artificial Sequence
  Description of Artificial Sequence: Synthetic peptide
  Seed: HIHIFSFTGEEMATK
HIHIFSITIEESATK

SEQ ID NO: 283729 - protein, 15 aa, Artificial Sequence
  Description of Artificial Sequence: Synthetic peptide
  Seed: HIHIFSFTGEEMATK
HIHFFSHTWEEDATK

SEQ ID NO: 283730 - protein, 15 aa, Artificial Sequence
  Description of Artificial Sequence: Synthetic peptide
  Seed: HIHIFSFTGEEMATK
HIHIFSFTNEEAATK

SEQ ID NO: 283731 - protein, 15 aa, Artificial Sequence
  Description of Artificial Sequence: Synthetic peptide
  Seed: HIHIFSFTGEEMATK
HIHWFSKTYEEFATK

SEQ ID NO: 283732 - protein, 15 aa, Artificial Sequence
  Description of Artificial Sequence: Synthetic peptide
  Seed: HIHIFSFTGEEMATK
HIHFFSYTNEELATK

SEQ ID NO: 283733 - protein, 15 aa, Artificial Sequence
  Description of Artificial Sequence: Synthetic peptide
  Seed: HIHIFSFTGEEMATK
HIHCFSMTLEEIATK

SEQ ID NO: 283734 - protein, 15 aa, Artificial Sequence
  Description of Artificial Sequence: Synthetic peptide
  Seed: HIHIFSFTGEEMATK
HIHIFSITIEEEATK

SEQ ID NO: 283735 - protein, 15 aa, Artificial Sequence
  Description of Artificial Sequence: Synthetic peptide
  Seed: HIHIFSFTGEEMATK
HIHFFSHTPEELATK

SEQ ID NO: 283736 - protein, 15 aa, Artificial Sequence
  Description of Artificial Sequence: Synthetic peptide
  Seed: HIHIFSFTGEEMATK
HIHIFSWTIEEAATK

SEQ ID NO: 283737 - protein, 15 aa, Artificial Sequence
  Description of Artificial Sequence: Synthetic peptide
  Seed: HIHIFSFTGEEMATK
HIHFFSITDEELATK

SEQ ID NO: 283738 - protein, 15 aa, Artificial Sequence
  Description of Artificial Sequence: Synthetic peptide
  Seed: HIHIFSFTGEEMATK
HIHWFSETFEENATK

SEQ ID NO: 283739 - protein, 15 aa, Artificial Sequence
  Description of Artificial Sequence: Synthetic peptide
  Seed: HIHIFSFTGEEMATK
HIHFFSLTHEEYATK

SEQ ID NO: 283740 - protein, 15 aa, Artificial Sequence
  Description of Artificial Sequence: Synthetic peptide
  Seed: HIHIFSFTGEEMATK
HIHLFSMTMEEAATK

SEQ ID NO: 283741 - protein, 15 aa, Artificial Sequence
  Description of Artificial Sequence: Synthetic peptide
  Seed: HIHIFSFTGEEMATK
HIHAFSATAEEVATK

SEQ ID NO: 283742 - protein, 15 aa, Artificial Sequence
  Description of Artificial Sequence: Synthetic peptide
  Seed: HIHIFSFTGEEMATK
HIHIFSFTSEEAATK

SEQ ID NO: 283743 - protein, 15 aa, Artificial Sequence
  Description of Artificial Sequence: Synthetic peptide
  Seed: HIHIFSFTGEEMATK
HIHFFSFTNEETATK

SEQ ID NO: 283744 - protein, 15 aa, Artificial Sequence
  Description of Artificial Sequence: Synthetic peptide
  Seed: HIHIFSFTGEEMATK
HIHYFSKTFEEHATK

SEQ ID NO: 283745 - protein, 15 aa, Artificial Sequence
  Description of Artificial Sequence: Synthetic peptide
  Seed: HIHIFSFTGEEMATK
HIHWFSETFEEEATK

SEQ ID NO: 283746 - protein, 15 aa, Artificial Sequence
  Description of Artificial Sequence: Synthetic peptide
  Seed: HIHIFSFTGEEMATK
HIHFFSFTSEEEATK

SEQ ID NO: 283747 - protein, 15 aa, Artificial Sequence
  Description of Artificial Sequence: Synthetic peptide
  Seed: HIHIFSFTGEEMATK
HIHLFSCTLEELATK

SEQ ID NO: 283748 - protein, 15 aa, Artificial Sequence
  Description of Artificial Sequence: Synthetic peptide
  Seed: HIHIFSFTGEEMATK
HIHIFSQTIEEVATK

SEQ ID NO: 283749 - protein, 15 aa, Artificial Sequence
  Description of Artificial Sequence: Synthetic peptide
  Seed: HIHIFSFTGEEMATK
HIHYFSFTVEEDATK

SEQ ID NO: 283750 - protein, 15 aa, Artificial Sequence
  Description of Artificial Sequence: Synthetic peptide
  Seed: HIHIFSFTGEEMATK
HIHIFSQTIEEFATK

SEQ ID NO: 283751 - protein, 15 aa, Artificial Sequence
  Description of Artificial Sequence: Synthetic peptide
  Seed: HIHIFSFTGEEMATK
HIHLFSFTSEEAATK

SEQ ID NO: 283752 - protein, 15 aa, Artificial Sequence
  Description of Artificial Sequence: Synthetic peptide
  Seed: HIHIFSFTGEEMATK
HIHIFSFTTEEAATK

SEQ ID NO: 283753 - protein, 15 aa, Artificial Sequence
  Description of Artificial Sequence: Synthetic peptide
  Seed: HIHIFSFTGEEMATK
HIHFFSKTWEESATK

SEQ ID NO: 283754 - protein, 15 aa, Artificial Sequence
  Description of Artificial Sequence: Synthetic peptide
  Seed: HIHIFSFTGEEMATK
HIHLFSFTQEEIATK

SEQ ID NO: 283755 - protein, 15 aa, Artificial Sequence
  Description of Artificial Sequence: Synthetic peptide
  Seed: HIHIFSFTGEEMATK
HIHLFSETIEEMATK

SEQ ID NO: 283756 - protein, 15 aa, Artificial Sequence
  Description of Artificial Sequence: Synthetic peptide
  Seed: HIHIFSFTGEEMATK
HIHFFSETPEELATK

SEQ ID NO: 283757 - protein, 15 aa, Artificial Sequence
  Description of Artificial Sequence: Synthetic peptide
  Seed: HIHIFSFTGEEMATK
HIHLFSETFEEDATK

SEQ ID NO: 283758 - protein, 15 aa, Artificial Sequence
  Description of Artificial Sequence: Synthetic peptide
  Seed: HIHIFSFTGEEMATK
HIHFFSYTSEEAATK

SEQ ID NO: 283759 - protein, 15 aa, Artificial Sequence
  Description of Artificial Sequence: Synthetic peptide
  Seed: HIHIFSFTGEEMATK
HIHFFSFTSEEKATK

SEQ ID NO: 283760 - protein, 15 aa, Artificial Sequence
  Description of Artificial Sequence: Synthetic peptide
  Seed: HIHIFSFTGEEMATK
HIHFFSYTQEEIATK

SEQ ID NO: 283761 - protein, 15 aa, Artificial Sequence
  Description of Artificial Sequence: Synthetic peptide
  Seed: HIHIFSFTGEEMATK
HIHIFSFTNEESATK

SEQ ID NO: 283762 - protein, 15 aa, Artificial Sequence
  Description of Artificial Sequence: Synthetic peptide
  Seed: HIHIFSFTGEEMATK
HIHFFSFTNEEQATK

SEQ ID NO: 283763 - protein, 15 aa, Artificial Sequence
  Description of Artificial Sequence: Synthetic peptide
  Seed: HIHIFSFTGEEMATK
HIHIFSSTAEEVATK

SEQ ID NO: 283764 - protein, 15 aa, Artificial Sequence
  Description of Artificial Sequence: Synthetic peptide
  Seed: HIHIFSFTGEEMATK
HIHIFSFTDEEAATK

SEQ ID NO: 283765 - protein, 15 aa, Artificial Sequence
  Description of Artificial Sequence: Synthetic peptide
  Seed: HIHIFSFTGEEMATK
HIHIFSATNEEAATK

SEQ ID NO: 283766 - protein, 554 aa, Artificial Sequence
  Description of Artificial Sequence: Synthetic polypeptide
MRVTAPRTLILLLSGALALTETWAGSGGSGGGGSGGFAMELPSFGLGGSGGGGSGGFPYTGDPPIGGSGGGGSGGMAMGMFNMFGGSGGGGSGGMMMGMFNMLGGSGGGGSGGMRNMLSTVYGGSGGGGSGGMTIGVTVIRGGSGGGGSGGNMISTTFPYGGSGGGGSGGNVISTTFPYGGSGGGGSGGRMLTLNTMTKGGSGGGGSGGTTFFYRYGWGGSGGGGSGGGMMMGMFNMMSSVLHVSGGSGGGGSGGGMMMGMFNMNSNVLVVSGGSGGGGSGGGMMMGMINMMSSVLRVSGGSGGGGSGGGNEFKAHLFNVIRKMMTNSQGGSGGGGSGGGNEFKASLFNVVRKMMTNSQGGSGGGGSGGGNEKKAKIANIVRKMATNSQGGSGGGGSGGSPGFMMHMFNMLSTVGGSGGGGSGGSPGFMMSMYNMLSTVGGSGGGGSGGSPGMIMGYFPMLRTVGGSGGGGSGGSPGRMMFMANMFSTVGGSLGGGGSGIVGIVAGLAVLAVVVIGAVVATVMCRRKSSGGKGGSYSQAASSDSAQGSDVSLTA
